(19) United States
(12) Patent Application Publication
(10) Pub. No.: US 2020/0239897 A1
(43) Pub. Date: Jul. 30, 2020

(54) PROMOTERS FROM CORYNEBACTERIUM GLUTAMICUM AND USES THEREOF IN REGULATING ANCILLARY GENE EXPRESSION

(71) Applicant: Zymergen Inc., Emeryville, CA (US)

(72) Inventors: Zach Serber, Sausalito, CA (US); Katherine G. Gora, Oakland, CA (US); Shawn P. Manchester, Oakland, CA (US); Peter Enyeart, Berkeley, CA (US); Alexander Shearer, Mountain View, CA (US)

(21) Appl. No.: 16/620,188

(22) PCT Filed: Jun. 7, 2018
(86) PCT No.: PCT/US2018/036472

§ 371 Date: Dec. 6, 2019

Related U.S. Application Data
(60) Provisional application No. 62/516,609, filed on Jun. 7, 2017.

(51) Int. Cl. C12N 15/77; C12P 13/08

(52) U.S. Cl. CPC C12N 15/77; C12P 13/08

(57) ABSTRACT

Provided are native promoters comprising polynucleotides isolated from Corynebacterium glutamicum, and mutant promoters derived therefrom, which may be used to regulate, i.e., either increase or decrease, on-pathway and/or off-pathway gene expression. Also provided are promoter ladders comprising a plurality of the promoters having incrementally increasing promoter activity. Also provided are host cells and recombinant vectors comprising the promoters, and methods of expressing ancillary genes of interest and producing biomolecules using the host cells.

### CROSS-REFERENCE TO RELATED APPLICATION

[0001] This application claims the benefit of priority under Section 119(e) of U.S. Provisional Application Ser. No. 62/516,609, entitled “PROMOTERS FROM CORYNEBACTERIUM GLUTAMICUM AND USES THEREOF IN REGULATING ANCILLARY GENE EXPRESSION,” filed Jun. 7, 2017, the disclosure of which is hereby incorporated by reference in the entirety and for all purposes.

### INCORPORATION BY REFERENCE OF THE SEQUENCE LISTING

[0002] The instant application contains a Sequence Listing which has been submitted electronically in ASCII format and is hereby incorporated by reference in its entirety. Said ASCII copy, created on Jun. 5, 2018, is named ZMG-004_PCT_SL.txt and is 645,695 bytes in size.

### BACKGROUND

### Field

[0003] The disclosure relates to native promoters comprising polynucleotides isolated from Corynebacterium glutamicum, and mutant promoters derived therefrom, host cells and recombinant vectors comprising the promoters, and methods of modifying the expression of ancillary target genes and producing biomolecules comprising culturing the host cells.

### Description of the Related Art

[0004] Strains of industrial important bacteria play a significant role in the production of biomolecules. For example, coryneform bacteria, in particular Corynebacterium glutamicum, can be cultured to produce biomolecules such as amino acids, organic acids, vitamins, nucleosides and nucleotides. Continuous efforts are being made to improve production processes. Said processes may be improved with respect to fermentation related measures such as, for example, stirring and oxygen supply, or the composition of nutrient media, such as, for example, sugar concentration during fermentation, nutrient feeding schedules, pH balance, metabolite removal, or the work-up into the product form, for example by means of ion exchange chromatography, or the intrinsic performance characteristics of the microorganism itself.

[0005] Performance characteristics can include, for example, yield, titer, productivity, by-product elimination, tolerance to process excursions, optimal growth temperature and growth rate. One way to improve performance of a microbial strain is to increase the expression of genes that control the production of a metabolite. Increasing expression of a gene can increase the activity of an enzyme that is encoded by that gene. Increasing enzyme activity can increase the rate of synthesis of the metabolic products made by the pathway to which that enzyme belongs. In some instances, increasing the rate of production of a metabolite can unbalance other cellular processes and inhibit growth of a microbial culture. Sometimes, down regulating activity is important to improve performance of a strain. For example, re-directing flux away from by-products can improve yield. Accordingly, fine-tuning of expression levels of the various components simultaneously within a metabolic pathway is often necessary.

[0006] Promoters regulate the rate at which genes are transcribed and can influence transcription in a variety of ways. Constitutive promoters, for example, direct the transcription of their associated genes at a constant rate regardless of the internal or external cellular conditions, while regulatable promoters increase or decrease the rate at which a gene is transcribed depending on the internal and/or the external cellular conditions, e.g. growth rate, temperature, responses to specific environmental chemicals, and the like. Promoters can be isolated from their normal cellular contexts and engineered to regulate the expression of virtually any gene, enabling the effective modification of cellular growth, product yield and/or other phenotypes of interest.

[0007] For the production of a target biomolecule, a promoter is typically functionally linked to a heterologous target gene that is a component of the biosynthetic pathway that makes the target biomolecule in the host cell. For example for production of lysine, a component of the lysine biosynthetic pathway (e.g., as defined in Kyoto Encyclopedia of Genes and Genomes (KEGG) pathway M00030) can be functionally linked to a heterologous promoter. The universe of such on-pathway components is finite and well-explored, and the potential for further optimization by modulating expression or activity of on-pathway target genes to optimize target biomolecule production is limited. However, the potential impact on the productivity and yield of such biomolecules afforded by operably linking heterologous promoters to one or more ancillary target genes, and thereby modulate expression of such target genes, in industrially important host strains has been largely unexplored. Thus, there remains a need in the art for methods and compositions to screen for, identify, and use ancillary target genes that can be modulated to increase or decrease expression or activity and thereby improve target biomolecule production.

### BRIEF SUMMARY

[0008] The present disclosure addresses these and other needs in the art. In brief, the present disclosure is directed to a host cell containing a promoter polynucleotide sequence functionally linked to at least one heterologous ancillary target gene, wherein the ancillary target gene is not a component of the biosynthetic pathway for producing the target biomolecule. The present disclosure provides methods for screening for, identifying, and using a promoter polynucleotide operably linked to a heterologous ancillary target gene to improve production of a target biomolecule.

[0009] In preferred embodiments, the promoter polynucleotide comprises a sequence selected from: SEQ ID NO:1, SEQ ID NO:2, SEQ ID NO:3, SEQ ID NO:4, SEQ ID NO:5, SEQ ID NO:6, SEQ ID NO:7, and SEQ ID NO:8. In some embodiments, the promoter polynucleotide consists of a sequence selected from:

[0010] SEQ ID NO:1, SEQ ID NO:5, or SEQ ID NO:7.

[0011] In some embodiments, the ancillary target gene is a gene that is classified under GOslim term GO:0003674; GO:0003677; GO:0008150; GO:0034641; or GO:0009058. Preferably, the ancillary target gene is a gene that is classified under, or under at least, 2, 3, 4, or 5 of the following GOslim terms GO:0003674; GO:0003677; GO:0008150; GO:0034641; or GO:0009058. In some embodiments, the ancillary target gene is selected from the genes of one or more, or all, of the following KEGG entries: M00010, M00002, M00007, M00580, or M00005.

[0012] In some embodiments, the ancillary target gene is not a component of a biosynthesis pathway comprising genes of one or more, or all, of the following KEGG entries: M00016; M00525; M00526; M00527; M00030; M00433 M00031; M00020; M00018; M00021; M00338; M00609; M00017; M00019; M00535; M00570; M00432; M00015; M00028; M00763; M00026; M00022; M00023; M00024; M00025; and M00040.

[0013] In one embodiment, the disclosure provides a host cell containing at least a first and a second promoter polynucleotide sequence, wherein the first promoter is functionally linked to a first heterologous target gene, wherein the first heterologous target gene is a component of a biosynthetic pathway for producing a target biomolecule, and the second promoter is functionally linked to a second heterologous ancillary target gene that is not a component of the biosynthetic pathway for producing the target biomolecule. In some embodiments, the first promoter can be a native promoter comprising polynucleotides isolated from Corynebacterium glutamicum, and/or a mutant promoter derived therefrom, which can each be encoded by short DNA sequences, ideally less than 100 base pairs, while the second promoter comprises a sequence selected from: SEQ ID NO:1, SEQ ID NO:2, SEQ ID NO:3, SEQ ID NO:4, SEQ ID NO:5, SEQ ID NO:6, SEQ ID NO:7, and SEQ ID NO:8. In some embodiments, both the first and the second promoter comprise a sequence selected from: SEQ ID NO:1, SEQ ID NO:2, SEQ ID NO:3, SEQ ID NO:4, SEQ ID NO:5, SEQ ID NO:6, SEQ ID NO:7, and SEQ ID NO:8. In some embodiments, the promoter polynucleotide consists of a sequence selected from: SEQ ID NO:1, SEQ ID NO:5, or SEQ ID NO:7.

[0014] One embodiment of the present disclosure relates to host cells comprising the first and/or second promoter polynucleotides described herein. One embodiment of the present disclosure relates to recombinant vectors comprising the first promoter polynucleotide and/or second promoter polynucleotide described herein. In some embodiments, the first promoter polynucleotide is functionally linked to a first on-pathway target gene. In some embodiments, the second promoter polynucleotide is functionally linked to a first or second ancillary target gene. One embodiment of the present disclosure relates to host cells comprising the combinations of promoter polynucleotides described herein. One embodiment of the present disclosure relates to recombinant vectors comprising the combinations of promoter polynucleotides described herein. In some embodiments, each promoter polynucleotide is functionally linked to a different target gene. Preferably, as described and demonstrated in more detail herein, the target genes are not part of the same metabolic pathway. In some embodiments, a first set of target genes are part of the same metabolic pathway and a second set of target genes are part of a different pathway. One embodiment of the present disclosure relates to host cells transformed with the recombinant vectors described herein.

[0015] One embodiment of the present disclosure relates to host cells comprising at least one promoter polynucleotide functionally linked to an ancillary target gene; wherein the promoter polynucleotide comprises a sequence selected from: SEQ ID NO:1, SEQ ID NO:2, SEQ ID NO:3, SEQ ID NO:4, SEQ ID NO:5, SEQ ID NO:6, SEQ ID NO:7, and SEQ ID NO:8; wherein when the promoter polynucleotide comprises a sequence selected from: SEQ ID NO:2, SEQ ID NO:3, SEQ ID NO:4, SEQ ID NO:6, or SEQ ID NO:8, the target gene is other than the promoter polynucleotide's endogenous gene. In some embodiments, the host cell comprises at least two promoter polynucleotides, wherein each promoter polynucleotide is functionally linked to a different target gene. One embodiment of the present disclosure relates to recombinant vectors comprising at least one promoter polynucleotide functionally linked to an ancillary target gene; wherein the promoter polynucleotide comprises a sequence selected from: SEQ ID NO:1, SEQ ID NO:2, SEQ ID NO:3, SEQ ID NO:4, SEQ ID NO:5, SEQ ID NO:6, SEQ ID NO:7, and SEQ ID NO:8; wherein when the promoter polynucleotide comprises a sequence selected from: SEQ ID NO:2, SEQ ID NO:3, SEQ ID NO:4, SEQ ID NO:6, or SEQ ID NO:8, the target gene is other than the promoter polynucleotide's endogenous gene.

[0016] In some embodiments, the recombinant vector comprises at least two promoter polynucleotides, wherein each promoter polynucleotide is functionally linked to a different target gene. Preferably, as described and demonstrated more fully herein, the target genes are not part of the same metabolic pathway. For example, one target gene can be an on-pathway target gene for production of a target biomolecule, and the second target gene can be an ancillary target gene.

[0017] One embodiment of the present disclosure relates to host cells transformed with the recombinant vectors described herein. In some cases, the transformed host cells comprise a combination of promoter polynucleotides functionally linked to a heterologous ancillary target gene or at least one heterologous ancillary target gene, wherein said combination of promoter polynucleotides comprises a promoter ladder. The individual promoter polynucleotides can be in different transformed host cells and operably linked to the same heterologous ancillary target gene sequence. In some embodiments, said combination of promoter polynucleotides comprises at least one first promoter polynucleotide, and at least one second promoter polynucleotide. In some embodiments, the first promoter polynucleotide is selected from the group consisting of SEQ ID NO:1, SEQ ID NO:5, and SEQ ID NO:7 and the second promoter polynucleotide is selected from the group consisting of: SEQ ID NO:2, SEQ ID NO:3, SEQ ID NO:4, SEQ ID NO:6, and SEQ ID NO:8 In some embodiments, said first and second promoter polynucleotide are in different host cells of a plurality of host cells and operably linked to the same heterologous ancillary target gene sequence. In some cases, the transformed host cells comprise a combination of promoter polynucleotides comprising a promoter ladder of two, three, four, five, six, seven, and/or eight different promoter polynucleotides. In some cases, said first, second, third, fourth, fifth, sixth, and/or seventh promoter polynucleotide are in different host cells of the plurality of transformed host cells and operably linked to the same heterologous ancillary target gene sequence.

[0018] In some cases, the transformed host cells comprising the combination of promoter polynucleotides functionally linked to a heterologous ancillary target gene or at least one heterologous ancillary target gene, wherein said combination of promoter polynucleotides comprises a promoter ladder, further comprises a promoter polynucleotide operably linked to an on-pathway, a shell 1, and/or a shell 2 heterologous target gene. In some cases, each of the transformed host cells, substantially all of the transformed host cells, or a majority of the transformed host cells comprises a promoter polynucleotide operably linked to an on-pathway, a shell 1, and/or a shell 2 heterologous target gene.

[0019] One embodiment of the present disclosure relates to methods of modifying the expression of one or more ancillary target genes, comprising culturing a host cell described herein, wherein the modification of each ancillary target gene is independently selected from: up-regulating and down-regulating. Preferably, the ancillary target gene does not code for one or more polypeptides or proteins of a biosynthetic pathway of biomolecules such as an amino acid, organic acid, nucleic acid, protein, or polymer. For example, in some embodiments, the ancillary target gene may code for one or more polypeptides or proteins of the biosynthetic pathway of a transcription factor, a signaling molecule, a component of the citric acid cycle, or a component of glycolysis.

[0020] Another embodiment of the present disclosure relates to methods of producing a biomolecule comprising culturing a host cell described herein, under conditions suitable for producing the biomolecule. In some embodiments the ancillary target gene directly or indirectly enhances the biosynthesis of a biomolecule selected from: amino acids, organic acids, flavors and fragrances, biofuels, proteins and enzymes, polymers/monomers and other biomaterials, lipids, nucleic acids, small molecule therapeutics, protein or peptide therapeutics, fine chemicals, and nutraceuticals. In preferred embodiments, the biomolecule is an L-amino acid. In specific embodiments, the L-amino acid is lysine.

[0021] In some embodiments, the host cell belongs to the genus Corynebacterium. In some embodiments, the host cell is Corynebacterium glutamicum.

### BRIEF DESCRIPTION OF THE DRAWINGS

[0022] FIG. 1 presents a diagram of the genetic and biochemical pathway for the biosynthesis of the amino acid L-lysine. Genes that divert intermediates in the biosynthetic pathway (e.g., pck, odx, icd, and hom) are underlined.

### DETAILED DESCRIPTION

[0023] In the following description, certain specific details are set forth in order to provide a thorough understanding of various embodiments of the disclosure. However, one skilled in the art will understand that the disclosure may be practiced without these details.

[0024] Unless the context requires otherwise, throughout the present specification and claims, the word “comprise” and variations thereof, such as, “comprises” and “comprising” are to be construed in an open, inclusive sense, that is as “including, but not limited to”.

[0025] As used herein, the term “recombinant nucleic acid molecule” refers to a recombinant DNA molecule or a recombinant RNA molecule. A recombinant nucleic acid molecule is any nucleic acid molecule containing joined nucleic acid molecules from different original sources and not naturally attached together. Recombinant RNA molecules include RNA molecules transcribed from recombinant DNA molecules. In particular, a recombinant nucleic acid molecule includes a nucleic acid molecule comprising a promoter of SEQ ID NOs:1 to 8 functionally linked to a heterologous target gene.

[0026] As used herein, the term “heterologous target gene” refers to any gene or coding sequence that is not controlled in its natural state (e.g., within a non-genetically modified cell) by the promoter to which it is operably linked in a particular genome. As provided herein, all target genes functionally linked to non-naturally occurring promoters are considered “heterologous target genes”. More specifically, as promoter polynucleotide sequences of SEQ ID NOs:1, 5, and 7 do not occur in nature, all functionally linked target gene sequences are “heterologous target gene” sequences. Similarly, all, e.g., naturally occurring, target genes in a host cell that are functionally linked with a promoter that is naturally occurring in the host cell but is not normally functionally linked to said target gene in a wild-type organism are “heterologous target genes.” As used herein, a heterologous target gene can include one or more target genes that are part of an operon. That is, the endogenous promoter of an operon is replaced with a promoter polynucleotide sequence having a nucleic sequence of SEQ ID NOs:1 to 8. As used herein, the term “promoter polynucleotide sequence” refers to nucleic acids having a sequence as recited in the associated SEQ ID NO.

[0027] A “metabolic pathway” or “biosynthetic pathway” is a series of substrate to product conversion reactions, each of which is catalysed by a gene product (e.g., an enzyme), wherein the product of one conversion reaction acts as the substrate for the next conversion reaction and which includes the conversion reactions from a feedstock to a target biomolecule. In some embodiments, the metabolic pathway is a pathway module as defined in the Kyoto Encyclopedia of Genes and Genomes KEGG database. As used herein, reference to the KEGG database, including maps and pathway modules therein, refers to the database as it is publicly available on the priority date of the present application.

[0028] An “on-pathway” heterologous target gene is a heterologous target gene that encodes a gene product (e.g., an enzyme or a component of a multi-enzyme complex) that is in the metabolic pathway by which the target biomolecule is produced in the organism in which it is present. Conventionally, the genes targeted for modification are those genes that are judged to be “on-pathway,” i.e., the genes for the metabolic enzymes known to be part of, or branching into or off of, the biosynthetic pathway for the molecule of interest (Keasling, JD. “Manufacturing molecules through metabolic engineering.” Science, 2010). Methods such as flux balance analysis (“FBA”) (Segre et al, “Analysis of optimality in natural and perturbed metabolic networks.” PNAS, 2002) are known that can automate the discovery of such genes.

[0029] An “ancillary” or “off-pathway” heterologous target gene, or heterologous target gene that is “not a component of a biosynthetic pathway for production of a target molecule” and the like is a heterologous target gene that does not encode a gene product (e.g., an enzyme or a component of a multi-enzyme complex) that is in the metabolic pathway by which the target biomolecule is produced in the organism in which it is present.

[0030] For example, an ancillary or off-pathway heterologous target gene for production of the target biomolecule L-lysine is a gene that is not disclosed in KEGG pathway module M00016, M00030, M00031, M00433, M00525, M00526, or M00527, or preferably all thereof. As another example, an ancillary or off-pathway heterologous target gene for production of the target biomolecule serine is a gene that is not disclosed in KEGG pathway module M00020. As another example, an ancillary or off-pathway heterologous target gene for production of the target biomolecule threonine is a gene that is not disclosed in KEGG pathway module M00018. As another example, an ancillary or off-pathway heterologous target gene for production of the target biomolecule cysteine is a gene that is not disclosed in KEGG pathway module M00021, M00338, or M00609, or preferably all thereof.

[0031] As yet another example, an ancillary or off-pathway heterologous target gene for production of the target biomolecule valine and/or isoleucine is a gene that is not disclosed in KEGG pathway module M00019. As yet another example, an ancillary off-pathway heterologous target gene for production of the target biomolecule isoleucine is a gene that is not disclosed in KEGG pathway module M00535, or M00570, or preferably all thereof. As yet another example, an ancillary or off-pathway heterologous target gene for production of the target biomolecule leucine is a gene that is not disclosed in KEGG pathway module M00432.

[0032] As yet another example, an ancillary or off-pathway heterologous target gene for production of the target biomolecule proline is a gene that is not disclosed in KEGG pathway module M00015. As yet another example, an ancillary or off-pathway heterologous target gene for production of the target biomolecule ornithine is a gene that is not disclosed in KEGG pathway module M00028, M00763, or preferably all thereof. As yet another example, an ancillary or off-pathway heterologous target gene for production of the target biomolecule histidine is a gene that is not disclosed in KEGG pathway module M00026.

[0033] As yet another example, aromatic amino acids such as tryptophan, tyrosine, and phenylalanine are produced via the shikimate pathway. Thus, an ancillary or off-pathway heterologous target gene for production of the target biomolecule shikimate or an amino acid that is a biosynthetic product of the shikimate pathway (e.g., one or more of the target biomolecules tryptophan, tyrosine, or phenylalanine) is a gene that is not disclosed in KEGG pathway module M00022. As yet another example, an ancillary or off-pathway heterologous target gene for production of the target biomolecule tryptophan is a gene that is not disclosed in KEGG pathway module M00022. As yet another example, an ancillary or off-pathway heterologous target gene for production of the target biomolecule phenylalanine is a gene that is not disclosed in KEGG pathway module M00024. As yet another example, an ancillary or off-pathway heterologous target gene for production of the target biomolecule tyrosine is a gene that is not disclosed in KEGG pathway module M00025, M00040, or the combination thereof.

[0034] As yet another example, in some embodiments, in the context of producing an L-lysine target biomolecule, a heterologous target gene that is a component of the biosynthetic pathway that produces L-lysine is one of the following genes, or an endogenous functional ortholog thereof in the organism in which it is present, asd, ask, aspB, cg0931, dapA, dapB, dapD, dapE, dapF, ddh, fbp, hom, icd, lysA, lysE, odx, pck, pgi, ppc, ptsG, pyc, tkt, or zwf. Accordingly, in the context of producing an L-lysine target biomolecule, an ancillary or off-pathway heterologous target gene is a gene that is not one of the following genes, or an endogenous functional ortholog thereof in the organism in which it is present, asd, ask, aspB, cg0931, dapA, dapB, dapD, dapE, dapF, ddh, fbp, hom, icd, lysA, lysE, odx, pck, pgi, ppc, ptsG, pyc, tkt, or zwf.

[0035] In some embodiments, target genes are divided into priority levels, called “shells” and promoter polynucleotides are operably linked to one or more heterologous target genes of a shell, wherein the shell is comprised genes that are indirectly involved in target molecule production. As used herein, “shell 1” genes are genes that encode biosynthetic enzymes directly involved in a selected metabolic pathway. “Shell 2” genes include genes encoding for non-shell 1 enzymes or other proteins within the biosynthetic pathway responsible for product diversion or feedback signaling. “Shell 3” genes include regulatory genes responsible for modulating expression of the biosynthetic pathway or for regulating carbon flux within the host cell. “Shell 4” genes are the genes of a target organism that are not assigned to any one of shells 1-3. Example 5 describes allocation of genes in C. glutamicum into shells for systematic genome-wide perturbation of lysine production.

[0036] In some cases, an ancillary heterologous target gene is a “shell 2,” “shell 3,” and/or “shell 4” heterologous target gene for production of a target molecule. In some cases, an ancillary heterologous target gene is a “shell 3” and/or “shell 4” heterologous target gene for production of a target molecule. In some cases, the ancillary heterologous target gene is a “shell 3” heterologous target gene for production of a target molecule. In some cases, the ancillary heterologous target gene is a “shell 4” heterologous target gene for production of a target molecule. In some cases, the ancillary heterologous target gene is a “shell 2” heterologous target gene for production of a target molecule.

[0037] Exemplary target genes and their shell designation in the context of lysine production in C. glutamicum are provided in Table 10 below.

[0038] Reference throughout this specification to “one embodiment” or “an embodiment” means that a particular feature, structure or characteristic described in connection with the embodiment is included in at least one embodiment of the present disclosure. Thus, the appearances of the phrases “in one embodiment” or “in an embodiment” in various places throughout this specification are not necessarily all referring to the same embodiment. It is appreciated that certain features of the invention, which are, for clarity, described in the context of separate embodiments, may also be provided in combination in a single embodiment. Conversely, various features of the invention, which are, for brevity, described in the context of a single embodiment, may also be provided separately or in any suitable subcombination.

### Polynucleotides Having Promoter Activity

[0039] Native C. glutamicum promoters were identified that satisfy both of the following criteria: 1) represent a ladder of constitutive promoters, i.e., a plurality of promoters with incrementally increasing levels of promoter activity; and 2) encoded by short DNA sequences, ideally less than 100 base pairs. A published data set describing global gene expression levels in C. glutamicum ATCC 13032 (Lee et al., Biotechnol Lett (2013) 35:709-717) was examined to identify genes that were constitutively expressed across different growth conditions. Genes whose expression level remained constant (defined as a ratio of expression between 0.33 and 3) across two growth conditions, namely chemostat growth in minimal media with and without the addition of hydrogen peroxide satisfied the first criterion. A published data set describing the C. glutamicum ATCC 13032 transcriptome (Pfeifer-Sancar et al., BMC Genomics 2013, 14:888) was examined to find genes with compact promoters, i.e. those consisting of the 60 base pair core promoter region and a 5′ untranslated region between 26 and 40 base pairs in length. The two data sets were cross-referenced to identify promoters that satisfied both criteria. The following five wild-type promoters were identified (Table 1).

TABLE 1
Promoters of C. glutamicum Having Increasing Levels of Expression
and Constituent Expression Under Different Growth Conditions

| Strain | SEQ ID NO | Mean Activity |
|---|---|---|
| Pcg1860-eyfp | 2 | 89243 |
| Pcg0007-eyfp | 3 | 44527 |
| Pcg0755-eyfp | 4 | 43592 |
| Pcg3381-eyfp | 6 | 4723 |
| Pcg3121-eyfp | 8 | 98 |

[0040] The wild-type promoters Pcg1860, and Pcg3121 are not described in the literature. The wild-type promoter Pcg0007-gyrB is also not described in the literature, however, Neumann and Quiñones, (J Basic Microbiol. 1997; 37(1):53-69) describes regulation of gyrB gene expression in E. coli. The wild type promoter Pcg0755 is a known part of the methionine biosynthesis pathway (Suda et al., Appl Microbiol Biotechnol (2008) 81:505-513; and Rey et al., Journal of Biotechnology 103 (2003) 51-65). The wild-type promoter Pcg3381 is a tatA homolog. The tatA pathway in Corynebacterium is described by Kikuchi et al., Applied and Environmental Microbiology, November 2006, p. 7183-7192. The strong constitutive promoter Pcg0007 was chosen for mutagenesis. Four out of six positions in the predicted ˜10 element (TAAGAT) of Pcg0007 were randomized to generate both stronger and attenuated promoter variants (SEQ ID NOs 1, 5, and 7).

[0041] Following the identification of promoters comprising SEQ ID NOs: 1-8, the present inventors determined that one or more such promoters can be functionally linked to one or more heterologous target genes of a biosynthetic pathway to increase the production of a target biomolecule produced by that biosynthetic pathway in a host cell. The identification and characterization of promoters of SEQ ID NOs: 1-8, and their use in upregaulting and/or downregulating expression of one or more on-pathway heterologous target genes to produce a target biomolecule are further described in PCT Appl. No. PCT/US16/65464, filed Dec. 7, 2016, the contents of which are hereby incorporated by reference in the entirety and for all purposes, including but not limited to the promoters of SEQ ID NO:1-8; vectors, expression cassettes, and host cells comprising said promoters, whether or not operably linked to a heterologous target gene, and methods and compositions for production of target biomolecules (e.g., using a promoter of SEQ ID NO:1-8).

[0042] Additionally, the present inventors surprisingly discovered that functionally linking one or more such promoters to one or more ancillary or off-pathway heterologous target genes can be used to increase production of the target biomolecule or further increase production of the target biomolecule.

[0043] For example, in some embodiments, functionally linking one or more such promoters to one or more ancillary heterologous target genes can be used to increase production of the target biomolecule in a strain background that does not have a promoter functionally linked to a heterologous target gene that is a component of the biosynthetic pathway that produces the target biomolecule. Additionally, in some embodiments, functionally linking one or more such promoters to one or more ancillary heterologous target genes can be used to increase production of the target biomolecule in a strain background that also comprises one or more promoters functionally linked to one or more heterologous target genes that are components of the biosynthetic pathway that produces the target biomolecule.

[0044] In some cases, the one or more promoters functionally linked to one or more heterologous target genes that are components of the biosynthetic pathway for production of a target biomolecule can be selected from SEQ ID NOs:1-8, SEQ ID NOs: 1, 5, and 7, and other promoters known in the art. Similarly, in some cases, the one or more promoters functionally linked to one or more ancillary heterologous target genes that are not components of the biosynthetic pathway for production of a target biomolecule can be selected from SEQ ID NOs:1-8, SEQ ID NOs: 1, 5, and 7, and other promoters known in the art.

[0045] Accordingly, one embodiment of the present disclosure relates to native promoters comprising polynucleotides isolated from C. glutamicum, and mutant promoters derived therefrom that together represent a ladder of constitutive promoters with incrementally increasing levels of promoter activity, wherein one or more of the ladder of promoters is functionally linked to a heterologous ancillary target gene for production of a target biomolecule. In some embodiments, a C. glutamicum promoter can be encoded by a short DNA sequence. In some embodiments a C. glutamicum promoter can be encoded by a DNA sequence of less than 100 base pairs. The promoters can be used in any strain background, including strains that also include a promoter functionally linked to a heterologous target gene that is in a biosynthetic pathway for production of a target biomolecule.

[0046] One embodiment of the present disclosure relates to a promoter polynucleotide comprising a sequence selected from: SEQ ID NO:1 (Pcg0007_lib_39), SEQ ID NO:2 (Pcg1860), SEQ ID NO:3 (Pcg0007), SEQ ID NO:4 (Pcg0755), SEQ ID NO:5 (Pcg0007_lib_265), SEQ ID NO:6 (Pcg3381), SEQ ID NO:7 (Pcg0007_lib_119), or SEQ ID NO:8 (Pcg3121). In another embodiment, the present specification provides for, and includes, a promoter polynucleotide comprising of SEQ ID NO:1 functionally linked to at least one heterologous ancillary target gene. In an embodiment, the present specification provides for, and includes, a promoter polynucleotide of SEQ ID NO:2 functionally linked to at least one heterologous ancillary target gene. In another embodiment, the present specification provides for, and includes, a promoter polynucleotide of SEQ ID NO:3 functionally linked to at least one heterologous ancillary target gene. In another embodiment, the present specification provides for, and includes, a promoter polynucleotide of SEQ ID NO:4 functionally linked to at least one heterologous ancillary target gene. In another embodiment, the present specification provides for, and includes, a promoter polynucleotide of SEQ ID NO:5 functionally linked to at least one heterologous ancillary target gene. In another embodiment, the present specification provides for, and includes, a promoter polynucleotide comprising of SEQ ID NO:5 functionally linked to at least one heterologous ancillary target gene. In another embodiment, the present specification provides for, and includes, a promoter polynucleotide of SEQ ID NO:7 functionally linked to at least one heterologous ancillary target gene. In another embodiment, the present specification provides for, and includes, a promoter polynucleotide of SEQ ID NO:8 functionally linked to at least one heterologous ancillary target gene.

[0047] As used herein, a “promoter cassette” refers to the polynucleotide sequences comprising a promoter polynucleotide of SEQ ID NOs:1 to 8 functionally linked to at least one heterologous ancillary target gene. In certain embodiments of the present disclosure, a “promoter cassette” may further include one or more of a linker polynucleotide, a transcription terminator following the ancillary target gene, a ribosome binding site upstream of the start codon of the ancillary target gene, and combinations of each.

[0048] One embodiment of the present disclosure relates to a promoter polynucleotide consisting of a sequence selected from: SEQ ID NO:1, SEQ ID NO:2, SEQ ID NO:3, SEQ ID NO:4, SEQ ID NO:5, SEQ ID NO:6, SEQ ID NO:7, or SEQ ID NO:8. In an embodiment, the present specification provides for, and includes a promoter polynucleotide sequence of SEQ ID NO:1. In an embodiment, the present specification provides for, and includes a promoter polynucleotide sequence of SEQ ID NO:5. In an embodiment, the present specification provides for, and includes a promoter polynucleotide sequence of SEQ ID NO:7. As used herein, a promoter cassette may be described by reference to the promoter name followed by the name of the heterologous target gene that is functionally linked to it. For example, the promoter of SEQ ID NO: 2, entitled Pcg1860, functionally linked to the gene zwf encoding the off-pathway glucose-6-phosphate 1-dehydrogenase gene is referenced as Pcg1860-zwf. Similarly, Pcg0007_39-lysA is the 0007_39 promoter of SEQ ID NO:1 functionally linked to target gene lysA encoding the polypeptide diaminopimelate decarboxylase.

[0049] One embodiment of the present disclosure relates to combinations of the promoter polynucleotides described herein. In this context the term “combinations of promoter polynucleotides” refers to two or more polynucleotides that may be present as separate isolated sequences, as components of separate polynucleotide molecules, or as components of the same polynucleotide molecule, and combinations thereof. Examples of polynucleotide molecules include chromosomes and plasmids.

[0050] The disclosure also relates to an isolated promoter polynucleotide, which essentially consists of a polynucleotide having the nucleotide sequence depicted in SEQ ID NO:1, SEQ ID NO:2, SEQ ID NO:3, SEQ ID NO:4, SEQ ID NO:5, SEQ ID NO:6, SEQ ID NO:7, or SEQ ID NO:8. In an embodiment, the present specification provides for, and includes an isolated promoter polynucleotide of SEQ ID NO:1. In an embodiment, the present specification provides for, and includes an isolated promoter polynucleotide of SEQ ID NO:5. In an embodiment, the present specification provides for, and includes an isolated promoter polynucleotide of SEQ ID NO:7.

[0051] The term “essentially” in this context means that a polynucleotide of no more than 1,000, no more than 800, no more than 700, no more than 600, no more than 500 or no more than 400 nucleotides in length; and a polynucleotide of no more than 15,000, no more than 10,000, no more than 7,500, no more than 5,000, no more than 2,500, no more than 1,000, no more than 800, no more than 700, no more than 600, no more than 500, or no more than 400 nucleotides in length have been added to the 5′ end and 3′ end, respectively, of the polynucleotides of SEQ ID NO:1, SEQ ID NO:2, SEQ ID NO:3, SEQ ID NO:4, SEQ ID NO:5, SEQ ID NO:6, SEQ ID NO:7, or SEQ ID NO:8.

[0052] Any useful combination of the features from the preceding two lists of polynucleotides added to the 5′ end and 3′ end, respectively, of the polynucleotides of SEQ ID NO:1, SEQ ID NO:2, SEQ ID NO:3, SEQ ID NO:4, SEQ ID NO:5, SEQ ID NO:6, SEQ ID NO:7, or SEQ ID NO:8, is in accordance with the invention here. “Useful combination” means, for example, a combination of features which results in an efficient recombination being carried out. The use of additions of the same length flanking a DNA region to be replaced facilitates the transfer of the region by homologous recombination in the experimental procedure. Relatively long flanking homologous regions are advantageous for efficient recombination between circular DNA molecules but cloning of the replacement vector is made more difficult with increasing length of the flanks (Wang et al., Molecular Biotechnology, 432:43-53 (2006)). The specification provides for, and includes, homologous regions flanking a promoter polynucleotide sequence of SEQ ID NOs:1 to 8 functionally linked to at least one heterologous ancillary target gene (e.g., the “promoter cassette”) to direct homologous recombination and replacement of a target gene sequence. In an embodiment, the homologous regions are direct repeat regions. In an embodiment, the homologous regions comprises between 500 base pairs (bp) and 5000 bp each of the target gene sequence flanking the promoter cassette. In an embodiment, the homologous regions comprises at least 500 bp each of the target gene sequence flanking the promoter cassette. In an embodiment, the homologous regions comprises at least 1000 bp (1 Kb) each of the target gene sequence flanking the promoter cassette. In an embodiment, the homologous regions comprises at least 2 Kb each of the target gene sequence flanking the promoter cassette. In an embodiment, the homologous regions comprises at least 5 Kb each of the target gene sequence flanking the promoter cassette.

[0053] The disclosure furthermore relates to an isolated promoter polynucleotide, which consists of the nucleotide sequence depicted in SEQ ID NO:1, SEQ ID NO:2, SEQ ID NO:3, SEQ ID NO:4, SEQ ID NO:5, SEQ ID NO:6, SEQ ID NO:7, or SEQ ID NO:8. In an embodiment, the isolated promoter polynucleotide consists of the polynucleotide sequence of SEQ ID NO:1. In an embodiment, the isolate promoter polynucleotide consists of the polynucleotide sequence of SEQ ID NO:5. In an embodiment, the isolate promoter polynucleotide consists of the polynucleotide sequence of SEQ ID NO:7.

[0054] Details regarding the biochemistry and chemical structure of polynucleotides as present in living things such as microorganisms, for example, can be found inter alia in the text book “Biochemie” [Biochemistry] by Berg et al. (Spektrum Akademischer Verlag Heidelberg Berlin, Germany, 2003; ISBN 3-8274-1303-6).

[0055] Polynucleotides consisting of deoxyribonucleotide monomers containing the nucleobases or bases adenine (A), guanine (G), cytosine (C) and thymine (T) are referred to as deoxyribo-polynucleotides or deoxyribonucleic acid (DNA). Polynucleotides consisting of ribonucleotide monomers containing the nucleobases or bases adenine (A), guanine (G), cytosine (C) and uracil (U) are referred to as ribopolynucleotides or ribonucleic acid (RNA). The monomers in said polynucleotides are covalently linked to one another by a 3′,5′-phosphodiester bond.

[0056] A “promoter polynucleotide” or a “promoter” or a “polynucleotide having promoter activity” means a polynucleotide, preferably deoxyribopolynucleotide, or a nucleic acid, preferably deoxyribonucleic acid (DNA), which when functionally linked to a polynucleotide to be transcribed determines the point and frequency of initiation of transcription of the coding polynucleotide, thereby enabling the strength of expression of the controlled polynucleotide to be influenced. The term “promoter ladder” as used herein refers to a plurality of promoters with incrementally increasing levels of promoter activity. The term “promoter activity” as used herein refers to the ability of the promoter to initiate transcription of an polynucleotide sequence into mRNA. Methods of assessing promoter activity are well known to those of skill in the art and include, for example the methods described in Example 2 of PCT/US16/65464. The term “constitutive promoter” as used herein refers to a promoter that directs the transcription of its associated gene at a constant rate regardless of the internal or external cellular conditions. In some cases, the promoters of the promoter ladder exhibit a range of promoter strengths in response to a stimuli (e.g., in response to induction with a chemical agent, heat, cold, stress, phosphate starvation, etc.). In some cases, the promoters of the promoter ladder exhibit a range of constitutive promoter strengths.

[0057] Owing to the double-stranded structure of DNA, the strand complementary to the strand in SEQ ID NO:1, SEQ ID NO:2, SEQ ID NO:3, SEQ ID NO:4, SEQ ID NO:5, SEQ ID NO:6, SEQ ID NO:7, or SEQ ID NO:8 of the sequence listing is likewise a subject of the invention.

### Kits

[0058] One embodiment of the present disclosure relates to kits comprising a first promoter polynucleotide comprising a sequence selected from: SEQ ID NO:1, SEQ ID NO:5, and SEQ ID NO:7, and a suitable storage means for the polynucleotide. In some embodiments, the first promoter polynucleotide consists of a sequence selected from: SEQ ID NO:1, SEQ ID NO:5, and SEQ ID NO:7. In some embodiments, the kits comprise combinations of promoter polynucleotides comprising at least two first promoter polynucleotides described herein. In some embodiments, the kits comprise combinations of promoter polynucleotides comprising at least one first promoter polynucleotide described herein, and at least one second promoter polynucleotide comprising a sequence selected from: SEQ ID NO:2, SEQ ID NO:3, SEQ ID NO:4, SEQ ID NO:6, and SEQ ID NO:8. In some embodiments, the kits comprise combinations of promoter polynucleotides comprising at least one first promoter polynucleotide described herein, and at least one second promoter polynucleotide consisting of a sequence selected from: SEQ ID NO:2, SEQ ID NO:3, SEQ ID NO:4, SEQ ID NO:6, and SEQ ID NO:8.

### Target Genes

[0059] One embodiment of the present disclosure relates to methods of modulating the expression of a heterologous target gene, comprising culturing a host cell transformed with a recombinant vector comprising a promoter polynucleotide as described herein. Heterologous target genes are polynucleotides the expression of which are controlled by the promoters described herein. The heterologous target genes may be coding polynucleotides which code for one or more polypeptide(s) or non-coding polynucleotides such as non-coding RNAs. A polynucleotide coding for a protein/polypeptide essentially consists of a start codon selected from the group consisting of ATG, GTG and TTG, preferably ATG or GTG, particularly preferably ATG, a protein-encoding sequence and one or more stop codon(s) selected from the group consisting of TAA, TAG and TGA. The heterologous target genes can be “on-pathway,” or “off-pathway,” or a combination thereof.

[0060] “Transcription” means the process by which a complementary RNA molecule is produced starting from a DNA template. This process involves proteins such as RNA polymerase, “sigma factors” and transcriptional regulatory proteins. Where the target gene is a coding polynucleotide, the synthesized RNA (messenger RNA, mRNA) then serves as a template in the process of translation which subsequently yields the polypeptide or protein.

[0061] “Functionally linked” means in this context the sequential arrangement of the promoter polynucleotide according to the disclosure with a further oligo- or polynucleotide, resulting in transcription of said further polynucleotide to produce a sense RNA transcript.

[0062] If the further polynucleotide is a target gene which codes for a polypeptide/protein and consists of the coding region for a polypeptide, starting with a start codon, including the stop codon and, where appropriate, including a transcription termination sequence, “functionally linked” then means the sequential arrangement of the promoter polynucleotide according to the invention with the target gene, resulting in transcription of said target gene and translation of the synthesized RNA.

[0063] If the target gene codes for a plurality of proteins/polypeptides, each gene may be preceded by a ribosome-binding site. Where appropriate, a termination sequence is located downstream of the last gene.

[0064] The target gene preferably codes for one or more polypeptides or proteins of the biosynthetic pathway of biomolecules, preferably selected from the group of proteinogenic amino acids, non-proteinogenic amino acids, vitamins, nucleosides, nucleotides and organic acids. The target gene preferably consists of one or more of the one-pathway and/or off-pathway target genes listed in Table 1 of EP 1 108 790 A2 which is hereby incorporated by reference.

[0065] The present specification provides for, and includes, recombinant nucleic acid molecules comprising a promoter polynucleotide sequence selected from the group consisting of SEQ ID NOs:1 to 8 functionally linked to any one of the heterologous target genes identifiable in the Kyoto Encyclopedia of Genes and Genomes (KEGG) as genes involved in metabolic and biosynthetic pathways. The KEGG database is available on the internet at genome.jp/kegg.

[0066] In preferred embodiments, the target biomolecule is an amino acid, a protein, or a carbohydrate polymer, and one or more of the promoter polynucleotide sequences of SEQ ID NOs:1 to 8 are functionally linked to one or more ancillary target genes of the citric acid cycle. In some cases, the ancillary target genes are selected from the genes in KEGG pathway M00010. In one embodiment, the target biomolecule is an amino acid, a protein, or a carbohydrate polymer and one or more of the promoter polynucleotide sequences of SEQ ID NOs:1 to 8 are functionally linked to one or more ancillary target genes of the glycolysis pathway. In some cases, the ancillary target genes are selected from the genes in KEGG pathway M00002. In one embodiment, the target biomolecule is an amino acid, a protein, or a carbohydrate polymer and one or more of the promoter polynucleotide sequences of SEQ ID NOs:1 to 8 are functionally linked to one or more ancillary target genes of the pentose phosphate pathway. In some cases, the ancillary target genes are selected from the genes in KEGG pathway M00007, or M00580, or the combination thereof.

[0067] In one embodiment, the target biomolecule is an amino acid, a protein, or a carbohydrate polymer and one or more of the promoter polynucleotide sequences of SEQ ID NOs:1 to 8 are functionally linked to one or more ancillary target genes of the PRPP biosynthesis pathway. In some cases, the ancillary target genes are selected from the genes in KEGG pathway M00005. In some cases, the target biomolecule is a specific amino acid or a set of amino acids, and one or more of the promoter polynucleotide sequences of SEQ ID NOs:1 to 8 are functionally linked to one or more ancillary target genes selected from a metabolic pathway for production of a different amino acid or set of amino acids.

[0068] In an embodiment, the promoter polynucleotide sequences of SEQ ID NOs:1 to 8 are functionally linked to one or more on-pathway target genes of the lysine biosynthesis pathway as represented in KEGG map number 00300. In an embodiment, the one or more on-pathway target genes are selected from the Lysine succinyl-DAP biosynthesis pathway, M00016. In an embodiment, the one or more on-pathway target genes are selected from the lysine acetyl-DAP biosynthesis pathway, M00525. In an embodiment, the one or more on-pathway target genes are selected from the lysine DAP dehydrogenase biosynthesis pathway, M00526. In an embodiment, the one or more on-pathway target genes are selected from the lysine DAP aminotransferase biosynthesis pathway, M00527. In an embodiment, the one or more on-pathway target genes are selected from the AAA pathway biosynthesis pathway, M00030. In an embodiment, the one or more on-pathway target genes are selected from the lysine biosynthesis pathway from 2-oxoglutarate, M00433 or the lysine biosynthesis pathway mediated by LysW, M00031.

[0069] The present disclosure provides for, and includes, the promoter polynucleotide sequences of SEQ ID NOs:1 to 8 are functionally linked to one or more on-pathway target genes of the serine biosynthesis pathway comprising genes of entry M00020. In an embodiment, the promoter polynucleotide sequences of SEQ ID NOs:1 to 8 are functionally linked to one or more on-pathway target genes of the threonine biosynthesis pathway comprising genes of KEGG entry M00018. In an embodiment, the promoter polynucleotide sequences of SEQ ID NOs:1 to 8 are functionally linked to one or more on-pathway target genes of the cysteine biosynthesis pathway comprising genes of KEGG entry M00021. In an embodiment, the promoter polynucleotide sequences of SEQ ID NOs:1 to 8 are functionally linked to one or more on-pathway target genes of the cysteine biosynthesis pathway comprising genes of KEGG entry M00338. In an embodiment, the promoter polynucleotide sequences of SEQ ID NOs:1 to 8 are functionally linked to one or more on-pathway target genes of the cysteine biosynthesis pathway comprising genes of KEGG entry M00609. In an embodiment, the promoter polynucleotide sequences of SEQ ID NOs:1 to 8 are functionally linked to one or more on-pathway target genes of the methionine biosynthesis pathway comprising genes of KEGG entry M00017. In an embodiment, the promoter polynucleotide sequences of SEQ ID NOs:1 to 8 are functionally linked to one or more on-pathway target genes of the valine/isoleucine biosynthesis pathway comprising genes of KEGG entry M00019. In an embodiment, the promoter polynucleotide sequences of SEQ ID NOs:1 to 8 are functionally linked to one or more on-pathway target genes of the isoleucine biosynthesis pathway comprising genes of KEGG entry M00535. In an embodiment, the promoter polynucleotide sequences of SEQ ID NOs:1 to 8 are functionally linked to one or more on-pathway target genes of the isoleucine biosynthesis pathway comprising genes of KEGG entry M00570. In an embodiment, the promoter polynucleotide sequences of SEQ ID NOs:1 to 8 are functionally linked to one or more on-pathway target genes of the leucine biosynthesis pathway comprising genes of KEGG entry M00432. In an embodiment, the promoter polynucleotide sequences of SEQ ID NOs:1 to 8 are functionally linked to one or more on-pathway target genes of the proline biosynthesis pathway comprising genes of KEGG entry M00015. In an embodiment, the promoter polynucleotide sequences of SEQ ID NOs:1 to 8 are functionally linked to one or more on-pathway target genes of the ornithine biosynthesis pathway comprising genes of KEGG entry M00028. In an embodiment, the promoter polynucleotide sequences of SEQ ID NOs:1 to 8 are functionally linked to one or more on-pathway target genes of the ornithine biosynthesis pathway comprising genes of KEGG entry M00763. In an embodiment, the promoter polynucleotide sequences of SEQ ID NOs:1 to 8 are functionally linked to one or more on-pathway target genes of the histidine biosynthesis pathway comprising genes of KEGG entry M00026. In an embodiment, the promoter polynucleotide sequences of SEQ ID NOs:1 to 8 are functionally linked to one or more on-pathway target genes of the shikimate biosynthesis pathway comprising genes of KEGG entry M00022. In an embodiment, the promoter polynucleotide sequences of SEQ ID NOs:1 to 8 are functionally linked to one or more on-pathway target genes of the tryptophan biosynthesis pathway comprising genes of entry M00023. In an embodiment, the promoter polynucleotide sequences of SEQ ID NOs:1 to 8 are functionally linked to one or more on-pathway target genes of the phenylalanine biosynthesis pathway comprising genes of KEGG entry M00024. In an embodiment, the promoter polynucleotide sequences of SEQ ID NOs:1 to 8 are functionally linked to one or more on-pathway target genes of the tyrosine biosynthesis pathway comprising genes of KEGG entry M00025. In an embodiment, the promoter polynucleotide sequences of SEQ ID NOs:1 to 8 are functionally linked to one or more on-pathway target genes of the tyrosine biosynthesis pathway comprising genes of KEGG entry M00040.

[0070] In a preferred embodiment, one or more of the promoter polynucleotide sequences of SEQ ID NOs:1 to 8 are functionally linked to one or more on-pathway target genes described herein and one or more promoter polynucleotide sequences of SEQ ID NOs:1 to 8 are functionally linked to one or more ancillary target genes described herein, e.g., in a host cell, a genome of a host cell, an expression cassette, and/or a polynucleotide vector. In another embodiment, one or more of the promoter polynucleotide sequences of SEQ ID NOs:1 to 8 are functionally linked to one or more on-pathway target genes described herein and one or more other promoter polynucleotide sequences are functionally linked to one or more ancillary target genes described herein, e.g., in a host cell, a genome of a host cell, an expression cassette, and/or a polynucleotide vector. In yet another embodiment, one or more of the promoter polynucleotide sequences of SEQ ID NOs:1 to 8 are functionally linked to one or more ancillary target genes described herein and one or more other promoter polynucleotide sequences are functionally linked to one or more on-pathway target genes described herein, e.g., in a host cell, a genome of a host cell, an expression cassette, and/or a polynucleotide vector.

[0071] The present disclosure provides for, and includes, the promoter polynucleotide sequences of SEQ ID NOs:1, 5 or 7 are functionally linked to one or more target genes of the serine biosynthesis pathway comprising genes of entry M00020. In an embodiment, the promoter polynucleotide sequences of SEQ ID NOs:1, 5 or 7 are functionally linked to one or more target genes of the threonine biosynthesis pathway comprising genes of KEGG entry M00018. In an embodiment, the promoter polynucleotide sequences of SEQ ID NOs:1, 5 or 7 are functionally linked to one or more target genes of the cysteine biosynthesis pathway comprising genes of KEGG entry M00021. In an embodiment, the promoter polynucleotide sequences of SEQ ID NOs:1, 5 or 7 are functionally linked to one or more target genes of the cysteine biosynthesis pathway comprising genes of KEGG entry M00338. In an embodiment, the promoter polynucleotide sequences of SEQ ID NOs:1, 5 or 7 are functionally linked to one or more target genes of the cysteine biosynthesis pathway comprising genes of KEGG entry M00609. In an embodiment, the promoter polynucleotide sequences of SEQ ID NOs:1, 5 or 7 are functionally linked to one or more target genes of the methionine biosynthesis pathway comprising genes of KEGG entry M00017. In an embodiment, the promoter polynucleotide sequences of SEQ ID NOs:1, 5 or 7 are functionally linked to one or more target genes of the valine/isoleucine biosynthesis pathway comprising genes of KEGG entry M00019. In an embodiment, the promoter polynucleotide sequences of SEQ ID NOs:1, 5 or 7 are functionally linked to one or more target genes of the isoleucine biosynthesis pathway comprising genes of KEGG entry M00535. In an embodiment, the promoter polynucleotide sequences of SEQ ID NOs:1, 5 or 7 are functionally linked to one or more target genes of the isoleucine biosynthesis pathway comprising genes of KEGG entry M00570. In an embodiment, the promoter polynucleotide sequences of SEQ ID NOs:1, 5 or 7 are functionally linked to one or more target genes of the leucine biosynthesis pathway comprising genes of KEGG entry M00432. In an embodiment, the promoter polynucleotide sequences of SEQ ID NOs:1, 5 or 7 are functionally linked to one or more target genes of the proline biosynthesis pathway comprising genes of KEGG entry M00015. In an embodiment, the promoter polynucleotide sequences of SEQ ID NOs:1, 5 or 7 are functionally linked to one or more target genes of the ornithine biosynthesis pathway comprising genes of KEGG entry M00028. In an embodiment, the promoter polynucleotide sequences of SEQ ID NOs:1, 5 or 7 are functionally linked to one or more target genes of the ornithine biosynthesis pathway comprising genes of KEGG entry M00763. In an embodiment, the promoter polynucleotide sequences of SEQ ID NOs:1, 5 or 7 are functionally linked to one or more target genes of the histidine biosynthesis pathway comprising genes of KEGG entry M00026. In an embodiment, the promoter polynucleotide sequences of SEQ ID NOs:1, 5 or 7 are functionally linked to one or more target genes of the shikimate biosynthesis pathway comprising genes of KEGG entry M00022. In an embodiment, the promoter polynucleotide sequences of SEQ ID NOs:1, 5 or 7 are functionally linked to one or more target genes of the tryptophan biosynthesis pathway comprising genes of entry M00023. In an embodiment, the promoter polynucleotide sequences of SEQ ID NOs:1, 5 or 7 are functionally linked to one or more target genes of the phenylalanine biosynthesis pathway comprising genes of KEGG entry M00024. In an embodiment, the promoter polynucleotide sequences of SEQ ID NOs:1, 5 or 7 are functionally linked to one or more target genes of the tyrosine biosynthesis pathway comprising genes of KEGG entry M00025. In an embodiment, the promoter polynucleotide sequences of SEQ ID NOs:1, 5 or 7 are functionally linked to one or more target genes of the tyrosine biosynthesis pathway comprising genes of KEGG entry M00040.

[0072] The present specification provides for, and includes, recombinant nucleic acid molecules comprising a promoter polynucleotide sequence selected from the group consisting of SEQ ID NOs:1 to 8 functionally linked to any one of the heterologous on- or off-pathway target genes from Corynebacterium glutamicum ATCC 13032 provided in Table 2 or any Corynebacterium glutamicum equivalent thereof. Sequence start and end positions correspond to genomic nucleotide accession NC 003450.3. It will be understood by those of ordinary skill in the art that corresponding genes exist in other strains of C. glutamicum and may be readily identified from Table 2. In an embodiment, the present specification provides for, and includes a recombinant nucleic acid molecule comprising a promoter polynucleotide sequence of SEQ ID NO:1 functionally linked to a heterologous target gene recited in Table 2. In an embodiment, the present specification provides for, and includes a recombinant nucleic acid molecule comprising a promoter polynucleotide sequence of SEQ ID NO:2 functionally linked to a heterologous target gene recited in Table 2. In an embodiment, the present specification provides for, and includes a recombinant nucleic acid molecule comprising a promoter polynucleotide sequence of SEQ ID NO:3 functionally linked to a heterologous target gene recited in Table 2. In an embodiment, the present specification provides for, and includes a recombinant nucleic acid molecule comprising a promoter polynucleotide sequence of SEQ ID NO:4 functionally linked to a heterologous target gene recited in Table 2. In an embodiment, the present specification provides for, and includes a recombinant nucleic acid molecule comprising a promoter polynucleotide sequence of SEQ ID NO:5 functionally linked to a heterologous target gene recited in Table 2. In an embodiment, the present specification provides for, and includes a recombinant nucleic acid molecule comprising a promoter polynucleotide sequence of SEQ ID NO:6 functionally linked to a heterologous target gene recited in Table 2. In an embodiment, the present specification provides for, and includes a recombinant nucleic acid molecule comprising a promoter polynucleotide sequence of SEQ ID NO:7 functionally linked to a heterologous target gene recited in Table 2. In an embodiment, the present specification provides for, and includes a recombinant nucleic acid molecule comprising a promoter polynucleotide sequence of SEQ ID NO:8 functionally linked to a heterologous target gene recited in Table 2.

TABLE 2
Target genes from Corynebacterium glutamicum according to the present specification

| Gene ID | Symbol | Aliases | Description | start | end | orientation |
|---|---|---|---|---|---|---|
| 1021315 | NCgl0248 | NCgl0248, | aspartate-semialdehyde | 270660 | 271694 | plus |
| | | Cgl0252 | dehydrogenase | | | |
| 1021300 | NCgl0223 | NCgl0223, | prephenate dehydrogenase | 241880 | 242902 | minus |
| | | Cgl0226 | | | | |
| 1021294 | NCgl0247 | NCgl0247, | aspartate kinase | 269371 | 270636 | plus |
| | | Cgl0251 | | | | |
| 1021282 | NCgl0215 | NCgl0215, | Aminotransferase | 232257 | 233282 | minus |
| | | Cgl0218 | | | | |
| 1021250 | NCgl0181 | NCgl0181, | glutamine 2-oxoglutarate | 195240 | 199772 | plus |
| | | Cgl0184 | aminotransferase large | | | |
| | | | subunit | | | |
| 1021247 | gltD | NCgl0182, | glutamate synthase | 199772 | 201292 | plus |
| | | Cgl0185 | | | | |
| 1021203 | aroE | NCgl0409, | quinate/shikimate | 446538 | 447389 | plus |
| | | Cgl0424 | dehydrogenase | | | |
| 1021149 | NCgl0245 | NCgl0245, | 2-isopropylmalate synthase | 266151 | 267896 | minus |
| | | Cgl0248 | | | | |
| 1021136 | gpmA | NCgl0390, | 2,3-bisphosphoglycerate- | 425177 | 425923 | plus |
| | | Cgl0402 | dependent phosphoglycerate | | | |
| | | | mutase | | | |
| 1021131 | NCgl0408 | NCgl0408, | 3-dehydroquinate | 446087 | 446524 | plus |
| | | Cgl0423 | dehydratase | | | |
| 1021078 | NCgl0398 | NCgl0398, | pyrroline-5-carboxylate | 434877 | 435698 | plus |
| | | Cgl0410 | reductase | | | |
| 1020978 | trpA | NCgl2932, | tryptophan synthase subunit | 3239333 | 3240175 | plus |
| | | Cgl3035 | alpha | | | |
| 1020976 | NCgl2931 | NCgl2931, | tryptophan synthase subunit | 3238083 | 3239336 | plus |
| | | Cgl3034 | beta | | | |
| 1020975 | NCgl2930 | NCgl2930, | bifunctional indole-3- | 3236642 | 3238066 | plus |
| | | trpC, trpF | glycerol phosphate | | | |
| | | | synthase/phospho- | | | |
| | | | ribosylanthranilate | | | |
| | | | isomerase | | | |
| 1020974 | trpD | NCgl2929, | anthranilate | 3235603 | 3236649 | plus |
| | | Cgl3032 | phosphoribosyltransferase | | | |
| 1020973 | NCgl2928 | NCgl2928, | anthranilate synthase II | 3234957 | 3235583 | plus |
| | | Cgl3031 | | | | |
| 1020972 | NCgl2927 | NCgl2927, | anthranilate synthase I | 3233404 | 3234960 | plus |
| | | Cgl3029 | | | | |
| 1020852 | NCgl2809 | NCgl2809, | pyruvate kinase | 3110462 | 3112321 | minus |
| | | Cgl2910 | | | | |
| 1020842 | NCgl2799 | NCgl2799, | prephenate dehydratase | 3098576 | 3099523 | minus |
| | | Cgl2899 | | | | |
| 1020841 | NCgl2798 | NCgl2798, | phosphoglycerate mutase | 3097902 | 3098573 | minus |
| | | Cgl2898 | | | | |
| 1020788 | NCgl2747 | NCgl2747, | Aminotransferase | 3030670 | 3031983 | plus |
| | | Cgl2844 | | | | |
| 1020745 | NCgl2704 | NCgl2704, | Nucleosidase | 2988212 | 2988772 | minus |
| | | Cgl2802 | | | | |
| 1020729 | NCgl2688 | NCgl2688, | cystathionine gamma- | 2972058 | 2973206 | minus |
| | | Cgl2786 | synthase | | | |
| 1020714 | NCgl2673 | NCgl2673, | fructose-bisphosphate | 2954239 | 2955273 | minus |
| | | Cgl2770 | aldolase | | | |
| 1020594 | NCgl2557 | NCgl2557, | dihydrodipicolinate | 2815459 | 2816397 | plus |
| | | Cgl2646 | synthase | | | |
| 1020564 | NCgl2528 | NCgl2528, | D-2-hydroxyisocaproate | 2786754 | 2787716 | minus |
| | | Cgl2617 | dehydrogenase | | | |
| 1020509 | NCgl2474 | NCgl2474, | serine acetyltransferase | 2723065 | 2723613 | plus |
| | | Cgl2563 | | | | |
| 1020508 | NCgl2473 | NCgl2473, | cysteine synthase | 2721905 | 2722861 | plus |
| | | Cgl2562 | | | | |
| 1020471 | NCgl2436 | NCgl2436, | phosphoserine phosphatase | 2669555 | 2670856 | minus |
| | | Cgl2522 | | | | |
| 1020393 | NCgl2360 | NCgl2360, | cystathionine gamma- | 2590310 | 2591470 | minus |
| | | Cgl2446 | synthase | | | |
| 1020370 | NCgl2337 | NCgl2337, | ribose-5-phosphate | 2563930 | 2564403 | minus |
| | | Cgl2423 | isomerase B | | | |
| 1020307 | NCgl2274 | NCgl2274, | gamma-glutamyl kinase | 2496668 | 2497777 | minus |
| | | Cgl2356 | | | | |
| 1020305 | proA | NCgl2272, | gamma-glutamyl phosphate | 2494337 | 2495635 | minus |
| | | Cgl2354 | reductase | | | |
| 1020301 | NCgl2268 | NCgl2268, | fructose-2,6-bisphosphatase | 2491149 | 2491859 | minus |
| | | Cgl2350 | | | | |
| 1020260 | NCgl2227 | NCgl2227, | PLP-dependent | 2444607 | 2445713 | plus |
| | | Cgl2309 | aminotransferase | | | |
| 1020188 | NCgl2155 | NCgl2155, | bifunctional RNase H/acid | 2371410 | 2372558 | minus |
| | | Cgl2236 | phosphatase | | | |
| 1020181 | NCgl2148 | NCgl2148, | glutamine synthase | 2362816 | 2364156 | minus |
| | | Cgl2229 | | | | |
| 1020172 | NCgl2139 | NCgl2139, | threonine synthase | 2353598 | 2355043 | minus |
| | | Cgl2220 | | | | |
| 1020166 | NCgl2133 | NCgl2133, | glutamine synthase | 2348830 | 2350263 | plus |
| | | Cgl2214 | | | | |
| 1020155 | NCgl2123 | NCgl2123, | branched-chain amino acid | 2335913 | 2337016 | minus |
| | | Cgl2204 | aminotransferase | | | |
| 1020130 | NCgl2098 | NCgl2098, | 3-deoxy-7- | 2307695 | 2309095 | minus |
| | | Cgl2178 | phosphoheptulonate | | | |
| | | | synthase | | | |
| 1020087 | NCgl2055 | NCgl2055, | cysteine synthase | 2258360 | 2259313 | minus |
| | | Cgl2136 | | | | |
| 1020086 | NCgl2054 | NCgl2054, | diaminopimelate | 2255736 | 2257025 | minus |
| | | Cgl2135 | decarboxylase | | | |
| 1020080 | NCgl2048 | NCgl2048, | methionine synthase II | 2247004 | 2248209 | minus |
| | | Cgl2129 | | | | |
| 1020078 | NCgl2046 | NCgl2046, | threonine dehydratase | 2244862 | 2246172 | minus |
| | | Cgl2127 | | | | |
| 1020053 | hisD | NCgl2021, | histidinol dehydrogenase | 2217597 | 2218925 | minus |
| | | Cgl2102 | | | | |
| 1020052 | NCgl2020 | NCgl2020, | histidinol-phosphate | 2216491 | 2217591 | minus |
| | | Cgl2101 | aminotransferase | | | |
| 1020051 | hisB | NCgl2019, | imidazoleglycerol- | 2215866 | 2216474 | minus |
| | | Cgl2100 | phosphate dehydratase | | | |
| 1020048 | hisH | NCgl2016, | imidazole glycerol | 2212638 | 2213273 | minus |
| | | Cgl2097 | phosphate synthase subunit | | | |
| | | | HisH | | | |
| 1020047 | NCgl2015 | NCgl2015, | phosphoribosyl isomerase A | 2211879 | 2212619 | minus |
| | | Cgl2096 | | | | |
| 1020045 | hisF | NCgl2013, | imidazole glycerol | 2210270 | 2211046 | minus |
| | | Cgl2094 | phosphate synthase subunit | | | |
| | | | HisF | | | |
| 1020044 | hisI | NCgl2012, | phosphoribosyl-AMP | 2209917 | 2210273 | minus |
| | | Cgl2093 | cyclohydrolase | | | |
| 1020042 | NCgl2010 | NCgl2010, | indole-3-glycerol phosphate | 2208364 | 2209149 | minus |
| | | Cgl2091 | synthase | | | |
| 1020040 | NCgl2008 | NCgl2008, | pyruvate kinase | 2205665 | 2207092 | minus |
| | | Cgl2089 | | | | |
| 1019930 | NCgl1898 | NCgl1898, | 4-hydroxy- | 2081188 | 2081934 | minus |
| | | Cgl1973 | tetrahydrodipicolinate | | | |
| | | | reductase | | | |
| 1019928 | dapA | NCgl1896, | 4-hydroxy- | 2079278 | 2080183 | minus |
| | | Cgl1971 | tetrahydrodipicolinate | | | |
| | | | synthase | | | |
| 1019900 | dapF | NCgl1868, | diaminopimelate epimerase | 2051842 | 2052675 | minus |
| | | Cgl1943 | | | | |
| 1019614 | NCgl1583 | NCgl1583, | L-serine deaminase | 1744884 | 1746233 | plus |
| | | Cgl1645 | | | | |
| 1019598 | aroE | NCgl1567, | shikimate 5-dehydrogenase | 1724609 | 1725439 | minus |
| | | Cgl1629 | | | | |
| 1019592 | NCgl1561 | NCgl1561, | chorismate synthase | 1719666 | 1720898 | minus |
| | | Cgl1623 | | | | |
| 1019591 | aroK | NCgl1560, | shikimate kinase | 1719104 | 1719676 | minus |
| | | Cgl1622 | | | | |
| 1019590 | aroB | NCgl1559, | 3-dehydroquinate synthase | 1717935 | 1719032 | minus |
| | | Cgl1621 | | | | |
| 1019571 | NCgl1541 | NCgl1541, | methionine | 1699174 | 1700397 | minus |
| | | Cgl1603 | adenosyltransferase | | | |
| 1019566 | NCgl1536 | NCgl1536, | ribulose-phosphate 3- | 1693259 | 1693918 | minus |
| | | Cgl1598 | epimerase | | | |
| 1019556 | NCgl1526 | NCgl1526, | glyceraldehyde-3-phosphate | 1682621 | 1683625 | minus |
| | | Cgl1588 | dehydrogenase | | | |
| 1019555 | pgk | NCgl1525, | phosphoglycerate kinase | 1681187 | 1682404 | minus |
| | | Cgl1587 | | | | |
| 1019554 | tpiA | NCgl1524, | triosephosphate isomerase | 1680329 | 1681108 | minus |
| | | Cgl1586 | | | | |
| 1019550 | NCgl1520 | NCgl1520, | ornithine cyclodeaminase | 1674120 | 1675268 | minus |
| | | Cgl1582 | | | | |
| 1019543 | NCgl1513 | NCgl1513, | Transaldolase | 1666673 | 1667755 | plus |
| | | Cgl1575 | | | | |
| 1019542 | NCgl1512 | NCgl1512, | Transketolase | 1664403 | 1666505 | plus |
| | | Cgl1574 | | | | |
| 1019512 | NCgl1482 | NCgl1482, | aconitate hydratase | 1626279 | 1629110 | plus |
| | | Cgl1540 | | | | |
| 1019480 | NCgl1450 | NCgl1450, | methionine synthase I | 1587570 | 1591235 | minus |
| | | Cgl1507 | cobalamin-binding subunit | | | |
| 1019478 | hisE | NCgl1448, | phosphoribosyl-ATP | 1586462 | 1586725 | minus |
| | | Cgl1505 | pyrophosphatase | | | |
| 1019477 | hisG | NCgl1447, | ATP | 1585600 | 1586445 | minus |
| | | Cgl1504 | phosphoribosyltransferase | | | |
| 1019377 | NCgl1347 | NCgl1347, | argininosuccinate lyase | 1471477 | 1472910 | plus |
| | | Cgl1401 | | | | |
| 1019376 | NCgl1346 | NCgl1346, | argininosuccinate synthase | 1470211 | 1471416 | plus |
| | | Cgl1400 | | | | |
| 1019374 | NCgl1344 | NCgl1344, | ornithine | 1468565 | 1469524 | plus |
| | | Cgl1398 | carbamoyltransferase | | | |
| 1019373 | argD | NCgl1343, | acetylornithine | 1467376 | 1468551 | plus |
| | | Cgl1397 | aminotransferase | | | |
| 1019372 | NCgl1342 | NCgl1342, | acetylglutamate kinase | 1466422 | 1467375 | plus |
| | | Cgl1396 | | | | |
| 1019371 | argJ | NCgl1341, | bifunctional ornithine | 1465210 | 1466376 | plus |
| | | Cgl1395 | acetyltransferase/N- | | | |
| | | | acetylglutamate synthase | | | |
| 1019370 | argC | NCgl1340, | N-acetyl-gamma-glutamyl- | 1464053 | 1465126 | plus |
| | | Cgl1394 | phosphate reductase | | | |
| 1019293 | leuD | NCgl1263, | 3-isopropylmalate | 1381902 | 1382495 | plus |
| | | Cgl1316 | dehydratase small subunit | | | |
| 1019292 | NCgl1262 | NCgl1262, | 3-isopropylmalate | 1380440 | 1381885 | plus |
| | | Cgl1315 | dehydratase large subunit | | | |
| 1019267 | NCgl1237 | NCgl1237, | 3-isopropylmalate | 1353489 | 1354511 | plus |
| | | Cgl1286 | dehydrogenase | | | |
| 1019265 | NCgl1235 | NCgl1235, | D-3-phosphoglycerate | 1350855 | 1352447 | plus |
| | | Cgl1284 | dehydrogenase | | | |
| 1019254 | NCgl1224 | NCgl1224, | ketol-acid reductoisomerase | 1340724 | 1341740 | plus |
| | | Cgl1273 | | | | |
| 1019253 | ilvH | NCgl1223, | acetolactate synthase small | 1340025 | 1340543 | plus |
| | | Cgl1272 | subunit | | | |
| 1019252 | NCgl1222 | NCgl1222, | acetolactate synthase large | 1338131 | 1340011 | plus |
| | | Cgl1271 | subunit | | | |
| 1019249 | NCgl1219 | NCgl1219, | dihydroxy-acid dehydratase | 1333439 | 1335280 | minus |
| | | Cgl1268 | | | | |
| 1019232 | NCgl1202 | NCgl1202, | 6-phosphofructokinase | 1315046 | 1316086 | plus |
| | | Cgl1250 | | | | |
| 1019167 | NCgl1137 | NCgl1137, | homoserine kinase | 1243855 | 1244784 | plus |
| | | Cgl1184 | | | | |
| 1019166 | NCgl1136 | NCgl1136, | homoserine dehydrogenase | 1242507 | 1243844 | plus |
| | | Cgl1183 | | | | |
| 1019163 | NCgl1133 | NCgl1133, | diaminopimelate | 1239929 | 1241266 | plus |
| | | Cgl1180 | decarboxylase | | | |
| 1019124 | NCgl1094 | NCgl1094, | 5- | 1188385 | 1190622 | minus |
| | | Cgl1139 | methyltetrahydropteroyl- | | | |
| | | | triglutamate--homocysteine S- | | | |
| | | | methyltransferase | | | |
| 1019117 | aroE | NCgl1087, | shikimate 5-dehydrogenase | 1180869 | 1181675 | minus |
| | | Cgl1132 | | | | |
| 1019094 | NCgl1064 | NCgl1064, | succinyl-diaminopimelate | 1155731 | 1156840 | plus |
| | | Cgl1109 | desuccinylase | | | |
| 1019093 | NCgl1063 | NCgl1063, | tetrahydrodipicolinate N- | 1154726 | 1155676 | minus |
| | | Cgl1108 | succinyltransferase | | | |
| 1019091 | NCgl1061 | NCgl1061, | 2,3,4,5-tetrahydropyridine- | 1152370 | 1153263 | minus |
| | | Cgl1106 | 2,6-dicarboxylate N- | | | |
| | | | succinyltransferase | | | |
| 1019042 | NCgl1013 | NCgl1013, | phosphoglycerate mutase | 1107503 | 1108204 | plus |
| | | Cgl1058 | | | | |
| 1018983 | glyA | NCgl0954, | serine | 1050624 | 1051928 | plus |
| | | Cgl0996 | hydroxymethyltransferase | | | |
| 1018979 | NCgl0950 | NCgl0950, | phospho-2-dehydro-3- | 1046610 | 1047710 | plus |
| | | Cgl0990 | deoxyheptonate aldolase | | | |
| 1018968 | NCgl0939 | NCgl0939, | threonine dehydratase | 1038718 | 1039650 | minus |
| | | Cgl0978 | | | | |
| 1018964 | eno | NCgl0935, | phosphopyruvate hydratase | 1034949 | 1036226 | plus |
| | | Cgl0974 | | | | |
| 1018934 | NCgl0905 | NCgl0905, | ribose-phosphate | 997463 | 998440 | minus |
| | | Cgl0942 | pyrophosphokinase | | | |
| 1018929 | NCgl0900 | NCgl0900, | glyceraldehyde-3-phosphate | 993174 | 994616 | plus |
| | | Cgl0937 | dehydrogenase | | | |
| 1018848 | NCgl0819 | NCgl0819, | hypothetical protein | 910852 | 911157 | minus |
| | | Cgl0853 | | | | |
| 1018824 | gltA | NCgl0795, | type II citrate synthase | 877838 | 879151 | plus |
| | | Cgl0829 | | | | |
| 1018823 | NCgl0794 | NCgl0794, | phosphoserine | 875982 | 877112 | minus |
| | | Cgl0828 | aminotransferase | | | |
| 1018809 | NCgl0780 | NCgl0780, | Aminotransferase | 861592 | 862755 | plus |
| | | Cgl0814 | | | | |
| 1018794 | NCgl0765 | NCgl0765, | fructose-1,6-bisphosphatase | 841514 | 842296 | minus |
| | | Cgl0799 | | | | |
| 1018759 | NCgl0730 | NCgl0730, | 3-phosphoshikimate 1- | 801187 | 802479 | minus |
| | | Cgl0764 | carboxyvinyltransferase | | | |
| 1018688 | NCgl0659 | NCgl0659, | pyruvate carboxylase | 705211 | 708633 | plus |
| | | Cgl0689 | | | | |
| 1018663 | NCgl0634 | NCgl0634, | monomeric isocitrate | 677828 | 680044 | minus |
| | | Cgl0664 | dehydrogenase (NADP+) | | | |

[0073] In an embodiment, the present specification provides for, and includes a recombinant vector comprising a promoter polynucleotide sequence of SEQ ID NO:1 functionally linked to an on- or off-pathway heterologous target gene recited in Table 2. In an embodiment, the present specification provides for, and includes a recombinant vector comprising a promoter polynucleotide sequence of SEQ ID NO:2 functionally linked to a heterologous target gene recited in Table 2. In an embodiment, the present specification provides for, and includes a recombinant vector comprising a promoter polynucleotide sequence of SEQ ID NO:3 functionally linked to a heterologous target gene recited in Table 2. In an embodiment, the present specification provides for, and includes a recombinant vector comprising a promoter polynucleotide sequence of SEQ ID NO:4 functionally linked to a heterologous target gene recited in Table 2. In an embodiment, the present specification provides for, and includes a recombinant vector comprising a promoter polynucleotide sequence of SEQ ID NO:5 functionally linked to a heterologous target gene recited in Table 2. In an embodiment, the present specification provides for, and includes a recombinant vector comprising a promoter polynucleotide sequence of SEQ ID NO:6 functionally linked to a heterologous target gene recited in Table 2. In an embodiment, the present specification provides for, and includes a recombinant vector comprising a promoter polynucleotide sequence of SEQ ID NO:7 functionally linked to a heterologous target gene recited in Table 2. In an embodiment, the present specification provides for, and includes a recombinant vector comprising a promoter polynucleotide sequence of SEQ ID NO:8 functionally linked to a heterologous target gene recited in Table 2.

[0074] In an embodiment, the present specification provides for, and includes, a host cell transformed with a recombinant vector comprising a promoter polynucleotide sequence of SEQ ID NO:1 functionally linked to an on- or off-pathway heterologous target gene recited in Table 2. In an embodiment, the present specification provides for, and includes, a host cell transformed with a recombinant vector comprising a promoter polynucleotide sequence of SEQ ID NO:2 functionally linked to a heterologous target gene recited in Table 2. In an embodiment, the present specification provides for, and includes, a host cell transformed with a recombinant vector comprising a promoter polynucleotide sequence of SEQ ID NO:3 functionally linked to a heterologous target gene recited in Table 2. In an embodiment, the present specification provides for, and includes, a host cell transformed with a recombinant vector comprising a promoter polynucleotide sequence of SEQ ID NO:4 functionally linked to a heterologous target gene recited in Table 2. In an embodiment, the present specification provides for, and includes, a host cell transformed with a recombinant vector comprising a promoter polynucleotide sequence of SEQ ID NO:5 functionally linked to a heterologous target gene recited in Table 2. In an embodiment, the present specification provides for, and includes, a host cell transformed with a recombinant vector comprising a promoter polynucleotide sequence of SEQ ID NO:6 functionally linked to a heterologous target gene recited in Table 2. In an embodiment, the present specification provides for, and includes, a host cell transformed with a recombinant vector comprising a promoter polynucleotide sequence of SEQ ID NO:7 functionally linked to a heterologous target gene recited in Table 2. In an embodiment, the present specification provides for, and includes, a host cell transformed with a recombinant vector comprising a promoter polynucleotide sequence of SEQ ID NO:8 functionally linked to a heterologous target gene recited in Table 2.

[0075] In an embodiment, the present specification provides for, and includes, a host cell transformed with a recombinant vector comprising a promoter polynucleotide sequence of SEQ ID NO:1 functionally linked to an on- or off-pathway heterologous target gene recited in Table 3. In an embodiment, the present specification provides for, and includes, a host cell transformed with a recombinant vector comprising a promoter polynucleotide sequence of SEQ ID NO:2 functionally linked to a heterologous target gene recited in Table 3. In an embodiment, the present specification provides for, and includes, a host cell transformed with a recombinant vector comprising a promoter polynucleotide sequence of SEQ ID NO:3 functionally linked to a heterologous target gene recited in Table 3. In an embodiment, the present specification provides for, and includes, a host cell transformed with a recombinant vector comprising a promoter polynucleotide sequence of SEQ ID NO:4 functionally linked to a heterologous target gene recited in Table 3. In an embodiment, the present specification provides for, and includes, a host cell transformed with a recombinant vector comprising a promoter polynucleotide sequence of SEQ ID NO:5 functionally linked to a heterologous target gene recited in Table 3. In an embodiment, the present specification provides for, and includes, a host cell transformed with a recombinant vector comprising a promoter polynucleotide sequence of SEQ ID NO:6 functionally linked to a heterologous target gene recited in Table 3. In an embodiment, the present specification provides for, and includes, a host cell transformed with a recombinant vector comprising a promoter polynucleotide sequence of SEQ ID NO:7 functionally linked to a heterologous target gene recited in Table 3. In an embodiment, the present specification provides for, and includes, a host cell transformed with a recombinant vector comprising a promoter polynucleotide sequence of SEQ ID NO:8 functionally linked to a heterologous target gene recited in Table 3.

TABLE 3
C. glutamican L-lysine Biosynthetic Pathway

| | | C. Glutamicum | | |
|---|---|---|---|---|
| Symbol | Gene Name (EC #) | Gene | Position | Expression |
| Asd | aspartate-semialdehyde | Asd | 270660 . . . 271694 | + |
| | dehydrogenase (EC: 1.2.1.11) | | | |
| dapA | 4-hydroxy-tetrahydrodipicolinate | dapA | Complement | + |
| | synthase (EC: 4.3.3.7) | | (2079278 . . . 2080183) | |
| dapB | dihydrodipicolinate reductase | Cgl1973 | complement | + |
| | (EC: 1.17.1.8) | | (2081188 . . . 2081934) | |
| dapD | 2,3,4,5-tetrahydropyridine-2- | dapD | complement | + |
| | carboxylate N- | | (1153838 . . . 1154731) | |
| | succinyltransferase | | | |
| | (EC: 2.3.1.117) | | | |
| dapD | 2,3,4,5-tetrahydropyridine-2- | dapD2 | complement | |
| | carboxylate N- | | (1156194 . . . 1157144) | |
| | succinyltransferase | | | |
| | (EC: 2.3.1.117) | | | |
| cg0931 | N-succinyldiaminopimelate | cg0931 | 863063 . . . 864226 | + |
| | aminotransferase (EC: 2.6.1.17) | | | |
| dapE | succinyl-diaminopimelate | dapE | 1157199 . . . 1158308 | + |
| | desuccinylase (EC: 3.5.1.18) | | | |
| dapF | diaminopimelate epimerase | dapF | complement | + |
| | (EC: 5.1.1.7) | | (2021891 . . . 2022724) | |
| lysA | diaminopimelate decarboxylase | lysA | 1241397 . . . 1242734 | + |
| | (EC: 4.1.1.20) | | | |
| ddh | diaminopimelate dehydrogenase | Ddh | complement | + |
| | (EC: 1.4.1.16) | | (2760062 . . . 2761024) | |
| ask (lysC) | Aspartokinase Lysc Alpha And | lysC | 269371 . . . 270636 | + |
| | Beta Subunits (EC: 2.7.2.4) | | | |
| aspB | Aspartate Aminotransferase | aspB | 256618 . . . 257898 | + |
| | (EC: 2.6.1.1) | | | |
| PTS | Phosphotransferase System | ptsG | 1424684 . . . 1426735 | + |
| | (PTS); Glucose-Specific Enzyme | | | |
| | II BC Component Of PTS | | | |
| | (EC: 2.7.1.69) | | | |
| zwf | glucose-6-phosphate 1- | Zwf | 1669327 . . . 1670871 | + |
| | dehydrogenase (EC: 1.1.1.49 | | | |
| | 1.1.1.363) | | | |
| pgi | glucose-6-phosphate isomerase | Pgi | complement | + |
| | (EC: 5.3.1.9) | | (909227 . . . 910849) | |
| Tkt | transketolase (EC: 2.2.1.1) | Tkt | 1665870 . . . 1667972 | + |
| fbp | 6-phosphofructokinase 1 | Cgl1250 | 1315046 . . . 1316086 | + |
| | (EC: 2.7.1.11) | | | |
| ppc | phosphoenolpyruvate | ppc | complement | + |
| | carboxylase (EC: 4.1.1.31) | | (1678851 . . . 1681610) | |
| pyc | pyruvate carboxylase | pyc | 706684 . . . 710106 | + |
| | (EC: 6.4.1.1) | | | |
| icd | isocitrate dehydrogenase | Icd | complement | − |
| | (EC: 1.1.1.42) | | (679301 . . . 681517) | |
| pck | phosphoenolpyruvate | pck | complement | − |
| | carboxykinase (GTP) | | (3025365 . . . 3027197) | |
| | (EC: 4.1.1.32) | | | |
| odx | Oxaloacetate decarboxylase | odx | AP017369.1: | − |
| | (EC 4.1.1.3) | | 1508967 . . . 1509782 | |
| | | | (from C. glutamicum | |
| | | | N24) | |
| hom | homoserine kinase (EC: 2.7.1.39) | Cgl1184 | 1243855 . . . 1244784 | − |
| | homoserine dehydrogenase | Cgl1183 | 1242507 . . . 1243844 | − |
| | (EC: 1.1.1.3); | | | |
| | threonine synthase | Cgl2220 | complement | − |
| | (EC: 4.2.3.1) | | (2353598 . . . 2355043) | |

[0076] In an embodiment, the present specification provides for, and includes a recombinant vector comprising a promoter polynucleotide sequence of SEQ ID NO:1 functionally linked to an on- or off-pathway heterologous target gene recited in Table 3. In an embodiment, the present specification provides for, and includes a recombinant vector comprising a promoter polynucleotide sequence of SEQ ID NO:2 functionally linked to a heterologous target gene recited in Table 3. In an embodiment, the present specification provides for, and includes a recombinant vector comprising a promoter polynucleotide sequence of SEQ ID NO:3 functionally linked to a heterologous target gene recited in Table 3. In an embodiment, the present specification provides for, and includes a recombinant vector comprising a promoter polynucleotide sequence of SEQ ID NO:4 functionally linked to a heterologous target gene recited in Table 3. In an embodiment, the present specification provides for, and includes a recombinant vector comprising a promoter polynucleotide sequence of SEQ ID NO:5 functionally linked to a heterologous target gene recited in Table 3. In an embodiment, the present specification provides for, and includes a recombinant vector comprising a promoter polynucleotide sequence of SEQ ID NO:6 functionally linked to a heterologous target gene recited in Table 3. In an embodiment, the present specification provides for, and includes a recombinant vector comprising a promoter polynucleotide sequence of SEQ ID NO:7 functionally linked to a heterologous target gene recited in Table 3. In an embodiment, the present specification provides for, and includes a recombinant vector comprising a promoter polynucleotide sequence of SEQ ID NO:8 functionally linked to a heterologous target gene recited in Table 3.

[0077] In an embodiment, the present specification provides for, and includes, a host cell transformed with a recombinant vector comprising a promoter polynucleotide sequence of SEQ ID NO:1 functionally linked to an on or off-pathway heterologous target gene recited in Table 3. In an embodiment, the present specification provides for, and includes, a host cell transformed with a recombinant vector comprising a promoter polynucleotide sequence of SEQ ID NO:2 functionally linked to a heterologous target gene recited in Table 3. In an embodiment, the present specification provides for, and includes, a host cell transformed with a recombinant vector comprising a promoter polynucleotide sequence of SEQ ID NO:3 functionally linked to a heterologous target gene recited in Table 3. In an embodiment, the present specification provides for, and includes, a host cell transformed with a recombinant vector comprising a promoter polynucleotide sequence of SEQ ID NO:4 functionally linked to a heterologous target gene recited in Table 3. In an embodiment, the present specification provides for, and includes, a host cell transformed with a recombinant vector comprising a promoter polynucleotide sequence of SEQ ID NO:5 functionally linked to a heterologous target gene recited in Table 3. In an embodiment, the present specification provides for, and includes, a host cell transformed with a recombinant vector comprising a promoter polynucleotide sequence of SEQ ID NO:6 functionally linked to a heterologous target gene recited in Table 3. In an embodiment, the present specification provides for, and includes, a host cell transformed with a recombinant vector comprising a promoter polynucleotide sequence of SEQ ID NO:7 functionally linked to a heterologous target gene recited in Table 3. In an embodiment, the present specification provides for, and includes, a host cell transformed with a recombinant vector comprising a promoter polynucleotide sequence of SEQ ID NO:8 functionally linked to a heterologous target gene recited in Table 3.

[0078] The present specification provides for a host cell transformed with a recombinant vector comprising a promoter polynucleotide sequence selected from the group consisting of SEQ ID NOs:1 to 8 functionally linked to any one of the on- or off-pathway heterologous target genes from Corynebacterium glutamicum ATCC 13032 provided in Table 4 or their Corynebacterium glutamicum equivalent thereof. Sequence start and end positions correspond to genomic nucleotide accession NC 003450.3. It will be understood by those of ordinary skill in the art that corresponding genes exist in other strains of C. glutamicum and may be readily identified from Table 4. In an embodiment, the present specification provides for, and includes, a host cell transformed with a recombinant vector comprising a promoter polynucleotide sequence of SEQ ID NO:1 functionally linked to a heterologous target gene recited in Table 4. In an embodiment, the present specification provides for, and includes, a host cell transformed with a recombinant vector comprising a promoter polynucleotide sequence of SEQ ID NO:2 functionally linked to a heterologous target gene recited in Table 4. In an embodiment, the present specification provides for, and includes, a host cell transformed with a recombinant vector comprising a promoter polynucleotide sequence of SEQ ID NO:3 functionally linked to a heterologous target gene recited in Table 4. In an embodiment, the present specification provides for, and includes, a host cell transformed with a recombinant vector comprising a promoter polynucleotide sequence of SEQ ID NO:4 functionally linked to a heterologous target gene recited in Table 4. In an embodiment, the present specification provides for, and includes, a host cell transformed with a recombinant vector comprising a promoter polynucleotide sequence of SEQ ID NO:5 functionally linked to a heterologous target gene recited in Table 4. In an embodiment, the present specification provides for, and includes, a host cell transformed with a recombinant vector comprising a promoter polynucleotide sequence of SEQ ID NO:6 functionally linked to a heterologous target gene recited in Table 4. In an embodiment, the present specification provides for, and includes, a host cell transformed with a recombinant vector comprising a promoter polynucleotide sequence of SEQ ID NO:7 functionally linked to a heterologous target gene recited in Table 4. In an embodiment, the present specification provides for, and includes, a host cell transformed with a recombinant vector comprising a promoter polynucleotide sequence of SEQ ID NO:8 functionally linked to a heterologous target gene recited in Table 4.

TABLE 4
C. glutamican L-methionine Biosynthetic Pathway

| | | C. Glutamicum | |
|---|---|---|---|
| Symbol | Gene Name (EC #) | Gene | Position |
| lysC | aspartate kinase | Cgl0251 | 269371 . . . 270636 |
| | [EC: 2.7.2.4] | | |
| | aspartate- | Cgl0252 | 270660 . . . 271694 |
| | semialdehyde | | |
| | dehydrogenase | | |
| | [EC: 1.2.1.11] | | |
| dapA | 4-hydroxy- | dapA | complement |
| | tetrahydro- | | (2079278 . . . 2080183) |
| | dipicolinate | | |
| | synthase | | |
| | [EC: 4.3.3.7] | | |
| dapA | 4-hydroxy- | Cgl2646 | 2815459 . . . 2816397 |
| | tetrahydro- | | |
| | dipicolinate | | |
| | synthase | | |
| | [EC: 4.3.3.7] | | |
| dapB | 4-hydroxy- | Cgl1973 | complement |
| | tetrahydro- | | (2081188 . . . 2081934) |
| | dipicolinate | | |
| | reductase | | |
| | [EC: 1.17.1.8] | | |
| dapD | 2,3,4,5- | Cgl1106 | complement |
| | tetrahydro- | | (1152370 . . . 1153263) |
| | pyridine-2- | | |
| | carboxylate N- | | |
| | succinyltransferase | | |
| | [EC: 2.3.1.117] | | |
| dapC | N- | Cgl0814 | 861592 . . . 862755 |
| | succinyldiamino- | | |
| | pimelate | | |
| | aminotransferase | | |
| | [EC: 2.6.1.17] | | |
| dapE | succinyl- | Cgl1109 | 1155731 . . . 1156840 |
| | diaminopimelate | | |
| | desuccinylase | | |
| | [EC: 3.5.1.18] | | |
| dapF | diaminopimelate | dapF | complement |
| | epimerase | | (2051842 . . . 2052675) |
| | [EC: 5.1.1.7] | | |
| lysA | diaminopimelate | Cgl1180 | 1239929 . . . 1241266 |
| | decarboxylase | | |
| | [EC: 4.1.1.20] | | |

[0079] In an embodiment, the present specification provides for, and includes a recombinant vector comprising a promoter polynucleotide sequence of SEQ ID NO:3 functionally linked to an on- or off-pathway heterologous target gene recited in Table 4. In an embodiment, the present specification provides for, and includes a recombinant vector comprising a promoter polynucleotide sequence of SEQ ID NO:4 functionally linked to a heterologous target gene recited in Table 4. In an embodiment, the present specification provides for, and includes a recombinant vector comprising a promoter polynucleotide sequence of SEQ ID NO:5 functionally linked to a heterologous target gene recited in Table 4. In an embodiment, the present specification provides for, and includes a recombinant vector comprising a promoter polynucleotide sequence of SEQ ID NO:6 functionally linked to a heterologous target gene recited in Table 4. In an embodiment, the present specification provides for, and includes a recombinant vector comprising a promoter polynucleotide sequence of SEQ ID NO:7 functionally linked to a heterologous target gene recited in Table 4. In an embodiment, the present specification provides for, and includes a recombinant vector comprising a promoter polynucleotide sequence of SEQ ID NO:8 functionally linked to a heterologous target gene recited in Table 4.

[0080] In an embodiment, the present specification provides for, and includes, a host cell transformed with a recombinant vector comprising a promoter polynucleotide sequence of SEQ ID NO:1 functionally linked to an on- or off-pathway heterologous target gene recited in Table 4. In an embodiment, the present specification provides for, and includes, a host cell transformed with a recombinant vector comprising a promoter polynucleotide sequence of SEQ ID NO:2 functionally linked to a heterologous target gene recited in Table 4. In an embodiment, the present specification provides for, and includes, a host cell transformed with a recombinant vector comprising a promoter polynucleotide sequence of SEQ ID NO:3 functionally linked to a heterologous target gene recited in Table 4. In an embodiment, the present specification provides for, and includes, a host cell transformed with a recombinant vector comprising a promoter polynucleotide sequence of SEQ ID NO:4 functionally linked to a heterologous target gene recited in Table 4. In an embodiment, the present specification provides for, and includes, a host cell transformed with a recombinant vector comprising a promoter polynucleotide sequence of SEQ ID NO:5 functionally linked to a heterologous target gene recited in Table 4. In an embodiment, the present specification provides for, and includes, a host cell transformed with a recombinant vector comprising a promoter polynucleotide sequence of SEQ ID NO:6 functionally linked to a heterologous target gene recited in Table 4. In an embodiment, the present specification provides for, and includes, a host cell transformed with a recombinant vector comprising a promoter polynucleotide sequence of SEQ ID NO:7 functionally linked to a heterologous target gene recited in Table 4. In an embodiment, the present specification provides for, and includes, a host cell transformed with a recombinant vector comprising a promoter polynucleotide sequence of SEQ ID NO:8 functionally linked to a heterologous target gene recited in Table 4.

[0081] The present specification provides for a host cell transformed with a recombinant vector comprising a promoter polynucleotide sequence selected from the group consisting of SEQ ID NOs:1 to 8 functionally linked to any one of the off-pathway heterologous target genes from Corynebacterium glutamicum ATCC 13032 provided in Table 5 or their Corynebacterium glutamicum equivalent thereof. Sequence start and end positions correspond to genomic nucleotide accession NC 003450.3. It will be understood by those of ordinary skill in the art that corresponding genes exist in other strains of C. glutamicum and may be readily identified from Table 5. In an embodiment, the present specification provides for, and includes, a host cell transformed with a recombinant vector comprising a promoter polynucleotide sequence of SEQ ID NO:1 functionally linked to a heterologous target gene recited in Table 5. In an embodiment, the present specification provides for, and includes, a host cell transformed with a recombinant vector comprising a promoter polynucleotide sequence of SEQ ID NO:2 functionally linked to a heterologous target gene recited in Table 5. In an embodiment, the present specification provides for, and includes, a host cell transformed with a recombinant vector comprising a promoter polynucleotide sequence of SEQ ID NO:3 functionally linked to a heterologous target gene recited in Table 5. In an embodiment, the present specification provides for, and includes, a host cell transformed with a recombinant vector comprising a promoter polynucleotide sequence of SEQ ID NO:4 functionally linked to a heterologous target gene recited in Table 5. In an embodiment, the present specification provides for, and includes, a host cell transformed with a recombinant vector comprising a promoter polynucleotide sequence of SEQ ID NO:5 functionally linked to a heterologous target gene recited in Table 5. In an embodiment, the present specification provides for, and includes, a host cell transformed with a recombinant vector comprising a promoter polynucleotide sequence of SEQ ID NO:6 functionally linked to a heterologous target gene recited in Table 5. In an embodiment, the present specification provides for, and includes, a host cell transformed with a recombinant vector comprising a promoter polynucleotide sequence of SEQ ID NO:7 functionally linked to a heterologous target gene recited in Table 5. In an embodiment, the present specification provides for, and includes, a host cell transformed with a recombinant vector comprising a promoter polynucleotide sequence of SEQ ID NO:8 functionally linked to a heterologous target gene recited in Table 5.

TABLE 5
C. glutamicum Off-Pathway Target Genes

| | | C. glutamicum | |
|---|---|---|---|
| Symbol | Gene Name (EC #) | Gene | Position |
| | Putative | NCgl0019 | 21501 . . . 21872 |
| | uncharacterized | | |
| | protein Cgl0020 | | |
| | Rhodanese-related | NCgl0054 | complement |
| | sulfurtransferases | | (92527 . . . 93120) |
| ureR | Transcriptional | NCgl0082 | complement |
| | regulators | | (128299 . . . 128814) |
| tyrA | Prephenate | NCgl0223 | complement |
| | dehydrogenase | | (283783 . . . 284805) |
| | [EC 1.3.1.12] | | |
| topA | DNA | NCgl0304 | 375048 . . . 378053 |
| | topoisomerase 1 | | |
| | [EC 5.99.1.2] | | |
| nusG | Transcription | NCgl0458 | 604434 . . . 605405 |
| | termination/ | | |
| | antitermination | | |
| | protein NusG | | |
| rpoB | DNA-directed RNA | NCgl0471 | 619984 . . . 623463 |
| | polymerase subunit | | |
| | beta (RNAP | | |
| | subunit beta) | | |
| | [EC 2.7.7.6] | | |
| | Transcriptional | NCgl0601 | 758218 . . . 758801 |
| | regulators | | |
| rhlE | Superfamily II DNA | NCgl0737 | complement |
| | and RNA helicases | | (925165 . . . 926439) |
| prfB | Peptide chain | NCgl0767 | 962986 . . . 964092 |
| | release factor 2 | | |
| | (RF-2) | | |
| purH | Bifunctional purine | NCgl0827 | 1042072 . . . 1043634 |
| | biosynthesis | | |
| | protein PurH | | |
| | [EC 2.1.2.3], | | |
| | IMP cyclohydrolase | | |
| | [EC 3.5.4.10] | | |
| | Putative | NCgl0966 | 1184332 . . . 1185576 |
| | uncharacterized | | |
| | protein Cgl1009 | | |
| rho | Transcription | NCgl1152 | 1386927 . . . 1389359 |
| | termination | | |
| | factor Rho | | |
| | [EC 3.6.4.—] | | |
| | Transcriptional | NCgl1261 | complement |
| | regulator | | (1533093 . . . 1533800) |
| leuC | 3-isopropylmalate | NCgl1262 | 1534054 . . . 1535493 |
| | dehydratase large | | |
| | subunit | | |
| | [EC 4.2.1.33] | | |
| ddl | D-alanine-- | NCgl1267 | 1538769 . . . 1539844 |
| | D-alanine | | |
| | ligase | | |
| | [EC 6.3.2.4] | | |
| | Predicted | NCgl1301 | 1571632 . . . 1572609 |
| | transcriptional | | |
| | regulators | | |
| cmk | Cytidylate kinase | NCgl1372 | 1667477 . . . 1668187 |
| | (CK) | | |
| | [EC 2.7.4.25] | | |
| ctaB | Protoheme IX | NCgl1511 | complement |
| | farnesyltransferase | | (1826368 . . . 1827339) |
| | [EC 2.5.1.—] | | |
| | Transcriptional | NCgl2425 | complement |
| | regulators | | (2640625 . . . 2641119) |
| | tRNA- | NCgl2481 | 2699108 . . . 2700253 |
| | dihydrouridine | | |
| | synthase | | |
| | [EC 1.3.1.—] | | |
| | Transcriptional | NCgl2527 | complement |
| | regulator | | (2760930 . . . 2761629) |
| | AraC-type | NCgl2587 | 2824273 . . . 2825286 |
| | DNA-binding | | |
| | domain-containing | | |
| | proteins | | |
| hspR | Predicted | NCgl2699 | complement |
| | transcriptional | | (2955572 . . . 2956012) |
| | regulators | | |
| dnaK | Chaperone protein | NCgl2702 | complement |
| | DnaK (HSP70) | | (2958093 . . . 2959949) |
| | Transcriptional | NCgl2802 | 3083687 . . . 3084724 |
| | regulator | | |
| mutM2 | Formamido- | NCgl2898 | 3217037 . . . 3217852 |
| | pyrimidine- | | |
| | DNA glycosylase | | |
| | [EC 3.2.2.23] | | |
| | Transcriptional | NCgl2921 | complement |
| | regulator | | (3246164 . . . 3246940) |
| | Uncharacterized | NCgl2982 | 3305877 . . . 3309221 |
| | membrane protein, | | |
| | putative virulence | | |
| | factor | | |

[0082] In an embodiment, the present specification provides for, and includes a recombinant vector comprising a promoter polynucleotide sequence of SEQ ID NO:3 functionally linked to an off-pathway heterologous target gene recited in Table 5. In an embodiment, the present specification provides for, and includes a recombinant vector comprising a promoter polynucleotide sequence of SEQ ID NO:4 functionally linked to a heterologous target gene recited in Table 5. In an embodiment, the present specification provides for, and includes a recombinant vector comprising a promoter polynucleotide sequence of SEQ ID NO:5 functionally linked to a heterologous target gene recited in Table 5. In an embodiment, the present specification provides for, and includes a recombinant vector comprising a promoter polynucleotide sequence of SEQ ID NO:6 functionally linked to a heterologous target gene recited in Table 5. In an embodiment, the present specification provides for, and includes a recombinant vector comprising a promoter polynucleotide sequence of SEQ ID NO:7 functionally linked to a heterologous target gene recited in Table 5. In an embodiment, the present specification provides for, and includes a recombinant vector comprising a promoter polynucleotide sequence of SEQ ID NO:8 functionally linked to a heterologous target gene recited in Table 5.

[0083] In an embodiment, the present specification provides for, and includes, a host cell transformed with a recombinant vector comprising a promoter polynucleotide sequence of SEQ ID NO:1 functionally linked to an off-pathway heterologous target gene recited in Table 5. In an embodiment, the present specification provides for, and includes, a host cell transformed with a recombinant vector comprising a promoter polynucleotide sequence of SEQ ID NO:2 functionally linked to a heterologous target gene recited in Table 5. In an embodiment, the present specification provides for, and includes, a host cell transformed with a recombinant vector comprising a promoter polynucleotide sequence of SEQ ID NO:3 functionally linked to a heterologous target gene recited in Table 5. In an embodiment, the present specification provides for, and includes, a host cell transformed with a recombinant vector comprising a promoter polynucleotide sequence of SEQ ID NO:4 functionally linked to a heterologous target gene recited in Table 5. In an embodiment, the present specification provides for, and includes, a host cell transformed with a recombinant vector comprising a promoter polynucleotide sequence of SEQ ID NO:5 functionally linked to a heterologous target gene recited in Table 5. In an embodiment, the present specification provides for, and includes, a host cell transformed with a recombinant vector comprising a promoter polynucleotide sequence of SEQ ID NO:6 functionally linked to a heterologous target gene recited in Table 5. In an embodiment, the present specification provides for, and includes, a host cell transformed with a recombinant vector comprising a promoter polynucleotide sequence of SEQ ID NO:7 functionally linked to a heterologous target gene recited in Table 5. In an embodiment, the present specification provides for, and includes, a host cell transformed with a recombinant vector comprising a promoter polynucleotide sequence of SEQ ID NO:8 functionally linked to a heterologous target gene recited in Table 5.

[0084] In an embodiment, the present specification provides for, and includes a recombinant vector comprising a promoter polynucleotide sequence of SEQ ID NO:1 functionally linked to an off-pathway heterologous target gene recited in Table 10. In an embodiment, the present specification provides for, and includes a recombinant vector comprising a promoter polynucleotide sequence of SEQ ID NO:2 functionally linked to an off-pathway heterologous target gene recited in Table 10. In an embodiment, the present specification provides for, and includes a recombinant vector comprising a promoter polynucleotide sequence of SEQ ID NO:3 functionally linked to an off-pathway heterologous target gene recited in Table 10. In an embodiment, the present specification provides for, and includes a recombinant vector comprising a promoter polynucleotide sequence of SEQ ID NO:4 functionally linked to a heterologous target gene recited in Table 10. In an embodiment, the present specification provides for, and includes a recombinant vector comprising a promoter polynucleotide sequence of SEQ ID NO:5 functionally linked to a heterologous target gene recited in Table 10. In an embodiment, the present specification provides for, and includes a recombinant vector comprising a promoter polynucleotide sequence of SEQ ID NO:6 functionally linked to a heterologous target gene recited in Table 10. In an embodiment, the present specification provides for, and includes a recombinant vector comprising a promoter polynucleotide sequence of SEQ ID NO:7 functionally linked to a heterologous target gene recited in Table 10. In an embodiment, the present specification provides for, and includes a recombinant vector comprising a promoter polynucleotide sequence of SEQ ID NO:8 functionally linked to a heterologous target gene recited in Table 10.

[0085] The present specification provides for a host cell transformed with a recombinant vector comprising a promoter polynucleotide sequence selected from a plurality of promoter polynucleotides comprising a promoter ladder. In some cases, the host cell is a component of a plurality of transformed host cells comprising the promoter ladder, e.g., wherein each cell of the plurality comprises a different promoter polynucleotide of the promoter ladder. In some cases, the promoter polynucleotides of the promoter ladder, in the same or different transformed host cells of the plurality, are operably linked to the same heterologous, e.g., ancillary, target gene. In some cases, the heterologous target gene is a shell 2, a shell 3, and/or a shell 4 heterologous target gene. In some cases, the heterologous target gene is a shell 3, and/or a shell 4 heterologous target gene. In some cases the heterologous target gene is a shell 4 heterologous target gene. In some cases, the heterologous target gene is a shell 2 heterolgous target gene. In some cases, the heterologous target gene is a shell 3 heterologous target gene. In some cases, the heterologous target gene is a heterologous target gene from Corynebacterium glutamicum, such as the heterologous target genes provided in Table 10, or optionally any one of the tables described herein. Sequence start and end positions in Table 10 correspond to genomic nucleotide accession NC_003450.3. It will be understood by those of ordinary skill in the art that corresponding genes exist in other strains of C. glutamicum and may be readily identified from the present disclosure.

[0086] In some cases, the promoter polynucleotides comprising the promoter ladder are selected from the group consisting of SEQ ID NOs:1 to 8 functionally linked to an off-pathway heterologous target gene, e.g., a shell 2, a shell 3, and/or a shell 4 heterologous target gene, an off-pathway heterologous target gene provided in Table 10, or optionally an off pathway target gene in any one of the tables described herein. In some cases the heterologous target gene is a shell 4 heterologous target gene.

[0087] In an embodiment, the present specification provides for, and includes, a host cell transformed with a recombinant vector comprising a promoter polynucleotide sequence of SEQ ID NO:1 functionally linked to a shell 2, a shell 3, and/or a shell 4 heterologous target gene, e.g., a heterologous target gene recited in Table 10. In some cases the heterologous target gene is a shell 4 heterologous target gene. In an embodiment, the present specification provides for, and includes, a host cell transformed with a recombinant vector comprising a promoter polynucleotide sequence of SEQ ID NO:2 functionally linked to a shell 2, a shell 3, and/or a shell 4 heterologous target gene, e.g., a heterologous target gene recited in Table 10. In some cases the heterologous target gene is a shell 4 heterologous target gene. In an embodiment, the present specification provides for, and includes, a host cell transformed with a recombinant vector comprising a promoter polynucleotide sequence of SEQ ID NO:3 functionally linked to a shell 2, a shell 3, and/or a shell 4 heterologous target gene, e.g., a heterologous target gene recited in Table 10. In some cases the heterologous target gene is a shell 4 heterologous target gene. In an embodiment, the present specification provides for, and includes, a host cell transformed with a recombinant vector comprising a promoter polynucleotide sequence of SEQ ID NO:4 functionally linked to a shell 2, a shell 3, and/or a shell 4 heterologous target gene, e.g., a heterologous target gene recited in Table 10. In some cases the heterologous target gene is a shell 4 heterologous target gene.

[0088] In an embodiment, the present specification provides for, and includes, a host cell transformed with a recombinant vector comprising a promoter polynucleotide sequence of SEQ ID NO:5 functionally linked to a shell 2, a shell 3, and/or a shell 4 heterologous target gene, e.g., a heterologous target gene recited in Table 10. In some cases the heterologous target gene is a shell 4 heterologous target gene. In an embodiment, the present specification provides for, and includes, a host cell transformed with a recombinant vector comprising a promoter polynucleotide sequence of SEQ ID NO:6 functionally linked to a shell 2, a shell 3, and/or a shell 4 heterologous target gene, e.g., a heterologous target gene recited in Table 10. In some cases the heterologous target gene is a shell 4 heterologous target gene.

[0089] In an embodiment, the present specification provides for, and includes, a host cell transformed with a recombinant vector comprising a promoter polynucleotide sequence of SEQ ID NO:7 functionally linked to a shell 2, a shell 3, and/or a shell 4 heterologous target gene, e.g., a heterologous target gene recited in Table 10. In some cases the heterologous target gene is a shell 2 heterologous target gene. In an embodiment, the present specification provides for, and includes, a host cell transformed with a recombinant vector comprising a promoter polynucleotide sequence of SEQ ID NO:8 functionally linked to a functionally linked to a shell 2, a shell 3, and/or a shell 4 heterologous target gene, e.g., a heterologous target gene recited in Table 10. In some cases the heterologous target gene is a shell 4 heterologous target gene.

[0090] In an embodiment, the present specification provides for, and includes a recombinant vector comprising a promoter polynucleotide sequence of SEQ ID NO:3 functionally linked to an off-pathway heterologous target gene recited in Table 10. In an embodiment, the present specification provides for, and includes a recombinant vector comprising a promoter polynucleotide sequence of SEQ ID NO:4 functionally linked to a heterologous target gene recited in Table 10. In an embodiment, the present specification provides for, and includes a recombinant vector comprising a promoter polynucleotide sequence of SEQ ID NO:5 functionally linked to a heterologous target gene recited in Table 10. In an embodiment, the present specification provides for, and includes a recombinant vector comprising a promoter polynucleotide sequence of SEQ ID NO:6 functionally linked to a heterologous target gene recited in Table 10. In an embodiment, the present specification provides for, and includes a recombinant vector comprising a promoter polynucleotide sequence of SEQ ID NO:7 functionally linked to a heterologous target gene recited in Table 10. In an embodiment, the present specification provides for, and includes a recombinant vector comprising a promoter polynucleotide sequence of SEQ ID NO:8 functionally linked to a heterologous target gene recited in Table 10.

[0091] In an embodiment, the present specification provides for, and includes, a host cell transformed with a recombinant vector comprising a promoter polynucleotide sequence of SEQ ID NO:1 functionally linked to an off-pathway heterologous target gene recited in Table 10. In an embodiment, the present specification provides for, and includes, a host cell transformed with a recombinant vector comprising a promoter polynucleotide sequence of SEQ ID NO:2 functionally linked to a heterologous target gene recited in Table 10. In an embodiment, the present specification provides for, and includes, a host cell transformed with a recombinant vector comprising a promoter polynucleotide sequence of SEQ ID NO:3 functionally linked to a heterologous target gene recited in Table 10. In an embodiment, the present specification provides for, and includes, a host cell transformed with a recombinant vector comprising a promoter polynucleotide sequence of SEQ ID NO:4 functionally linked to a heterologous target gene recited in Table 10. In an embodiment, the present specification provides for, and includes, a host cell transformed with a recombinant vector comprising a promoter polynucleotide sequence of SEQ ID NO:5 functionally linked to a heterologous target gene recited in Table 10. In an embodiment, the present specification provides for, and includes, a host cell transformed with a recombinant vector comprising a promoter polynucleotide sequence of SEQ ID NO:6 functionally linked to a heterologous target gene recited in Table 10. In an embodiment, the present specification provides for, and includes, a host cell transformed with a recombinant vector comprising a promoter polynucleotide sequence of SEQ ID NO:7 functionally linked to a heterologous target gene recited in Table 10. In an embodiment, the present specification provides for, and includes, a host cell transformed with a recombinant vector comprising a promoter polynucleotide sequence of SEQ ID NO:8 functionally linked to a heterologous target gene recited in Table 10.

[0092] As used herein, a host cell refers to an organisms described below in the section entitled ‘Expression’ that have been transformed with one or more of the promoter cassettes. As will be apparent to one of ordinary skill in the art, a host cell may comprise one or more promoter cassettes as described herein.

[0093] In some embodiments, the target gene is associated with a biosynthetic pathway producing a biomolecule selected from: amino acids, organic acids, flavors and fragrances, biofuels, proteins and enzymes, polymers/monomers and other biomaterials, lipids, nucleic acids, small molecule therapeutics, protein therapeutics, fine chemicals, and nutraceuticals.

[0094] In some embodiments the target gene is associated with a biosynthetic pathway producing a secondary metabolite selected from: antibiotics, alkaloids, terpenoids, and polyketides. In some embodiments the target gene is associated with a metabolic pathway producing a primary metabolite selected from: alcohols, amino acids, nucleotides, antioxidants, organic acids, polyols, vitamins, and lipids/fatty acids. In some embodiments the target gene is associated with a biosynthetic pathway producing a macromolecule selected from: proteins, nucleic acids, and polymers

[0095] In addition it may be advantageous for the production of L-amino acids to enhance, in particular to overexpress one or more enzymes of the respective biosynthesis pathway, glycolysis, anaplerosis, citric acid cycle, pentose phosphate cycle, amino acid export and optionally regulatory proteins.

[0096] Thus for example, for the production of L-amino acids, it may be advantageous for one or more genes selected from the following group to be enhanced, in particular overexpressed: the gene dapA coding for dihydrodipicolinate synthase (EP-B 0 197 335); the gene eno coding for enolase (DE: 19947791.4); the gene gap coding for glyceraldehyde-3-phosphate dehydrogenase (Eikmanns (1992), Journal of Bacteriology 174:6076-6086); the gene tpi coding for triosephosphate isomerase (Eikmanns (1992), Journal of Bacteriology 174:6076-6086); the gene pgk coding for 3-phosphoglycerate kinase (Eikmanns (1992), Journal of Bacteriology 174:6076-6086); the gene zwf coding for glucose-6-phosphate dehydrogenase (JP-A-09224661); the gene pyc coding for pyruvate carboxylase (DE-A-198 31 609; Eikmanns (1992), Journal of Bacteriology 174:6076-6086); the gene mqo coding for malate-quinone-oxidoreductase (Molenaar et al., European Journal of Biochemistry 254, 395-403 (1998)); the gene lysC coding for a feedback-resistant aspartate kinase (Accession No. P26512); the gene lysE coding for lysine export (DE-A-195 48 222); the gene hom coding for homoserine dehydrogenase (EP-A 0131171); the gene ilvA coding for threonine dehydratase (Mockel et al., Journal of Bacteriology (1992) 8065-8072)) or the allele ilvA (Fbr) coding for a feedback-resistant threonine dehydratase (Mockel et al., (1994) Molecular Microbiology 13: 833-842); the gene ilvBN coding for acetohydroxy acid synthase (EP-B 0356739); the gene ilvD coding for dihydroxy acid dehydratase (Sahm and Eggeling (1999) Applied and Environmental Microbiology 65: 1973-1979); and the gene zwa1 coding for the Zwa1 protein (DE: 19959328.0, DSM 13115).

[0097] Furthermore it may be advantageous for the production of L-amino acids also to attenuate, in particular to reduce, the expression of one or more genes selected from the group: the gene pck coding for phosphoenol pyruvate carboxykinase (DE 199 50 409.1; DSM 13047); the gene pgi coding for glucose-6-phosphate isomerase (U.S. Pat. No. 6,586,214; DSM 12969); the gene poxB coding for pyruvate oxidase (DE: 1995 1975.7; DSM 13114); and the gene zwa2 coding for the Zwa2 protein (DE: 19959327.2, DSM 13113).

[0098] In addition, it may furthermore be advantageous, for the production of amino acids, in particular L-lysine, to eliminate undesirable side reactions, (Nakayama: “Breeding of Amino Acid Producing Micro-organisms”, in: Overproduction of Microbial Products, Krumphanzl, Sikyta, Vanek (eds.), Academic Press, London, U K, 1982).

[0099] The promoter according to the disclosure can thus be used in each case for overexpressing or underexpressing the target gene in C. glutamicum.

### Methods of Identifying Ancillary Target Genes for Optimizing Production of Target Biomolecules

[0100] Described herein are methods for screening for and/or identifying ancillary target genes for modulation of expression and/or activity to improve target biomolecule production. In some cases, the heterologous ancillary target genes are shell 2, shell 3, and/or shell 4 target genes. In some cases, the heterologous ancillary target genes are shell 3 and/or shell 4 target genes. In some cases, the heterologous ancillary target genes are shell 4 target genes. Typically the methods involve screening a library of transformed host cells, wherein individual transformed host cells of the library comprise a different [promoter polynucleotide: operably linked heterologous ancillary target gene] combination as compared to other transformed cells of the library. Such combinations can then be identified from the library that improve target biomolecule production and used for manufacture of target biomolecule or further optimized.

[0101] Thus the methods can include one or more steps of providing such a library, and/or screening such a library, and/or identifying transformants exhibiting improved target molecule production, and/or isolating such improved transformants, and/or storing or expanding such improved transformants. In some embodiments, the promoter polynucleotides comprise a promoter ladder.

[0102] Generally, transformed host cells of the library further comprise an on-pathway modification. In some cases, the on-pathway modification is the same for all, essentially all, substantially all, or a majority of the transformed cells of the library. For example, for lysine production, all, essentially all, substantially all, or a majority of the transformed cells of the library can comprise a promoter polynucleotide operably linked to the on-pathway heterologous target gene lysA and/or one or more other promoter polynucleotide(s) operably linked to on-pathway heterologous target gene(s). In some cases, the transformed host cells comprise a wild-type strain background such that endogenous on-pathway target genes are operably linked to their corresponding endogenous promoters.

[0103] The library of transformed cells can comprise a promoter ladder, wherein the individual promoter polynucleotides of the promoter ladder are in different cells of the library. In general, different promoter polynucleotides of the promoter ladder are operably linked to the same heterologous ancillary target gene in the different transformed cells. As an example, for a library comprising a promoter ladder having eight different promoter polynucleotides and interrogating a single heterologous ancillary target gene, the minimum library size is eight cells, one cell containing each possible [promoter polynucleotide: operably linked heterologous ancillary target gene] combination, or nine cells where one cell is a control cell without a promoter polynucleotide of the promoter ladder. One of skill the in art can appreciate that the library of transformed host cells can contain a plurality (e.g., >10; >100; >1,000; 10-1,000; 10-10,000; or 100-100,000) of redundant copies of the minimal cellular set, of the library or a subset thereof. The library can further comprise an additional set of cells for each interrogated heterologous ancillary target gene, such that each interrogated heterologous ancillary target gene is operably linked to each of the different promoter polynucleotides of the promoter ladder in a different cell. This provides a set of cells, where each cell in the library is an experiment interrogating a different [promoter polynucleotide: operably linked heterologous ancillary target gene] combination.

[0104] The library can be provided by a number of techniques available to one of skill in the art. For example, a plurality of host cells having a selected background (e.g., modified for lysA overexpression) can be transformed with a library of recombinant vectors under conditions such that substantially all transformants are singly modified to contain a single [promoter polynucleotide operably linked heterologous ancillary target gene] combination. The recombinant vectors can be integrating vectors, such that the providing comprises engineering the genome of the host cell. The transformants can be isolated, stored, and/or expanded, and optionally assayed for target molecule production. Exemplary isolating methods include without limitation limiting dilution, plating, streaking, and/or colony picking. Exemplary storage methods include without limitation cryopreservation or sporulation. For example, transformants can be isolated, mixed with a suitable cryoprotectant (e.g., glycerol), cryogenically frozen under conditions suitable to limit ice crystal formation, and stored.

[0105] Moreover, the interrogated heterologous ancillary target genes can be assayed in plurality of (e.g., two or more) different on-pathway modification backgrounds. The assay of different on-pathway backgrounds can be performed simultaneously, e.g., in parallel, or sequentially. For example, the library of transformed host cells for increasing production of lysine can comprise a first sub-library of transformed host cells having a lysA overexpression modification and interrogating a plurality of [promoter polynucleotide operably linked heterologous target gene] combinations; and a second sub-library that differs from the first sub-library by having a different, or additional, on-pathway modification. Similarly, the library can comprise, or further comprise an off-pathway modification background and interrogating a plurality of [promoter polynucleotide operably linked heterologous target gene] combinations and/or interrogating a plurality of [promoter polynucleotide operably linked heterologous ancillary target gene] combinations. As an example, a library of transformed host cells for increasing production of lysine can comprise transformed host cells having a background comprising: an on-pathway lysA overexpression modification; an off-pathway pgi overexpression modification; and various [promoter polynucleotide operably linked heterologous ancillary target gene] combinations.

[0106] In some embodiments, the method includes identifying a host cell from the plurality of host cells that exhibits increased production of the target biomolecule. In some cases, the identifying step includes a reproducibility filter to identify host cells, and the underlying [promoter polynucleotide operably linked heterologous ancillary target gene] combinations that reproducibly exhibit increased production of the target biomolecule. For example, the identifying step can assay redundant copies of each [promoter polynucleotide operably linked heterologous ancillary target gene] combination and identify combinations that exhibit reproducibly improved target biomolecule production in all, substantially all, or a majority of the redundant copies. As another example, a statistical filter can be applied to exclude combinations that do not meet a selected level of statistical significance (e.g., p<0.05, 0.01, 0.005, or 0.001).

[0107] In some embodiments, the method can comprise an iterative method of providing a library. For example, a library can be provided, cultured, and one or more host cells exhibiting increased production of target biomolecule can comprise the background strain for a second round of library generation and screening. Thus, in some embodiments, a subsequent iteration creates a new host cell library comprising individual host cells harboring unique genetic variations that are a combination of genetic variation selected from amongst at least two individual host cells of a preceding host cell library. Iterations can be performed multiple times until a resulting host cell has acquired a selected level of target biomolecule production improvement; until further rounds of providing and screening a library exhibit diminishing improvement; or until improvement pleateus. In an embodiment, at least one round interrogates heterologous ancillary target genes. Additionally or alternatively, on-pathway genes can be interrogated in earlier or later rounds of library generation and screening, optionally in combination with further interrogation of heterologous ancillary target genes.

### Linkers

[0108] The target gene is positioned downstream of the promoter polynucleotide according to the invention, i.e. at the 3′ end, such that both polynucleotides are functionally linked to one another either directly or by means of a linker oligonucleotide or linker polynucleotide. Preference is given to the promoter and the target gene being functionally linked to one another by means of a linker oligonucleotide or linker polynucleotide. Said linker oligonucleotide or linker polynucleotide consists of deoxyribonucleotides.

[0109] In this context, the expression “functionally linked to one another directly” means that the nucleotide at the 3′ end of the promoter polynucleotide, e.g., SEQ ID NO:1, SEQ ID NO:2, SEQ ID NO:3, SEQ ID NO:4, SEQ ID NO:5, SEQ ID NO:6, SEQ ID NO:7, or SEQ ID NO:8, is linked directly to the first nucleotide of the start codon of a target gene. This results in “leaderless” mRNAs which start immediately with the 5′-terminal AUG start codon and therefore do not have any other translation initiation signals.

[0110] In this context, the expression “functionally linked to one another by means of a linker oligonucleotide” means that the nucleotide at the 3′ end of the promoter polynucleotide, e.g., SEQ ID NO:1, SEQ ID NO:2, SEQ ID NO:3, SEQ ID NO:4, SEQ ID NO:5, SEQ ID NO:6, SEQ ID NO:7, or SEQ ID NO:8, is linked by an oligonucleotide of 1, 2, 3, 4 or 5 nucleotides in length to the first nucleotide of the start codon of a target gene.

[0111] In this context, the expression “functionally linked to one another by means of a linker polynucleotide” means that the nucleotide at the 3′ end of the promoter polynucleotide, e.g., SEQ ID NO:1, SEQ ID NO:2, SEQ ID NO:3, SEQ ID NO:4, SEQ ID NO:5, SEQ ID NO:6, SEQ ID NO:7, or SEQ ID NO:8, is linked by a polynucleotide of from 6 to no more than 600 nucleotides in length to the first nucleotide of the start codon of a target gene.

[0112] In this context, the expression “functionally linked to one another” means that the target gene is bound to the promoter polynucleotide according to the invention in such a way that transcription of the target gene and translation of the synthesized RNA are ensured.

[0113] Depending on the technical requirement, the linker polynucleotide is:

[0114] 6-600, 6-500, 6-400, 6-300, 6-200, 6-180, 6-160, 6-140, 6-120, 6-100, 6-80, 6-60, 6-50, 6-40, 6-30, 6-28, 6-27, 6-26, or 6-25; or

[0115] 8-600, 8-500, 8-400, 8-300, 8-200, 8-180, 8-160, 8-140, 8-120, 8-100, 8-80, 8-60, 8-50, 8-40, 8-30, 8-28, 8-27, 8-26, or 8-25; or

[0116] 10-600, 10-500, 10-400, 10-300, 10-200, 10-180, 10-160, 10-140, 10-120, 10-100, 10-80, 10-60, 10-50, 10-40, 10-30, 10-28, 10-27, 10-26, or 10-25; or

[0117] 12-600, 12-500, 12-400, 12-300, 12-200, 12-180, 12-160, 12-140, 12-120, 12-100, 12-80, 12-60, 12-50, 12-40, 12-30, 12-28, 12-27, 12-26, or 12-25; or

[0118] 14-600, 14-500, 14-400, 14-300, 14-200, 14-180, 14-160, 14-140, 14-120, 14-100, 14-80, 14-60, 14-50, 14-40, 14-30, 14-28, 14-27, 14-26, or 14-20; or

[0119] 16-600, 16-500, 16-400, 16-300, 16-200, 16-180, 16-160, 16-140, 16-120, 16-100, 16-80, 16-60, 16-50, 16-40, 16-30, 16-28, 16-27, 16-26, or 16-25; or

[0120] 18-600, 18-500, 18-400, 18-300, 18-200, 18-180, 18-160, 18-140, 18-120, 18-100, 18-80, 18-60, 18-50, 18-40, 18-30, 18-28, 18-27, 18-26, or 18-25; or

[0121] 20-600, 20-500, 20-400, 20-300, 20-200, 20-180, 20-160, 20-140, 20-120, 20-100, 20-80, 20-60, 20-50, 20-40, 20-30, 20-28, 20-27, 20-26, or 20-25 nucleotides in length.

[0122] In particularly preferred embodiments, the linker polynucleotide is 20, 21, 22, 23, 24, or 25 nucleotides in length because this produces preferably functional constructs.

[0123] The disclosure further relates accordingly to an isolated promoter polynucleotide, essentially consisting of a promoter polynucleotide, e.g., SEQ ID NO:1, SEQ ID NO:2, SEQ ID NO:3, SEQ ID NO:4, SEQ ID NO:5, SEQ ID NO:6, SEQ ID NO:7, or SEQ ID NO:8, which, via the nucleotide at its 3′ end, is functionally linked, directly or by means of a linker polynucleotide which ensures translation of RNA, to a target gene which contains at its 5′ end an ATG or GTG start codon and codes for one or more off-pathway polypeptide(s). Preference is given to the promoter and target gene being functionally linked to one another by means of a linker polynucleotide.

[0124] The disclosure furthermore also relates to an isolated polynucleotide, essentially consisting of a promoter polynucleotide, e.g., SEQ ID NO:1, SEQ ID NO:2, SEQ ID NO:3, SEQ ID NO:4, SEQ ID NO:5, SEQ ID NO:6, SEQ ID NO:7, or SEQ ID NO:8, which, via the nucleotide at its 3′ end, is functionally linked to a linker oligonucleotide.

[0125] In addition, the disclosure furthermore relates to an isolated polynucleotide, essentially consisting of a promoter polynucleotide, e.g., SEQ ID NO:1, SEQ ID NO:2, SEQ ID NO:3, SEQ ID NO:4, SEQ ID NO:5, SEQ ID NO:6, SEQ ID NO:7, or SEQ ID NO:8, which, via the nucleotide at its 3′ end, is functionally linked to a linker polynucleotide which ensures translation of RNA.

[0126] In this context, the term “essentially” means that a polynucleotide of no more than 1,000, no more than 800, no more than 700, no more than 600, no more than 500, or no more than 400 nucleotides in length has been added to the 5′ end of the promoter polynucleotide, e.g., SEQ ID NO:1, SEQ ID NO:2, SEQ ID NO:3, SEQ ID NO:4, SEQ ID NO:5, SEQ ID NO:6, SEQ ID NO:7, or SEQ ID NO:8, and a polynucleotide of no more than 1,000, no more than 800, no more than 700, no more than 600, no more than 500, or no more than 400 nucleotides in length has been added to the 3′ of the target gene, or a polynucleotide of no more than 15,000, no more than 10,000, no more than 7,500, no more than 5,000, no more than 2,500, no more than 1,000, no more than 800, no more than 700, no more than 600, no more than 500, or no more than 400 nucleotides in length has been added to the 3′ end of the linker oligo- or polynucleotide.

[0127] Any useful combination of the features from the preceding three lists of polynucleotides is in accordance with the invention here. “Useful combination” means, for example, a combination of features which results in an efficient recombination being carried out. The use of additions of the same length flanking a DNA region to be replaced facilitates the transfer of the region by homologous recombination in the experimental procedure. Relatively long flanking homologous regions are advantageous for efficient recombination between circular DNA molecules but cloning of the replacement vector is made more difficult with increasing length of the flanks (Wang et al., Molecular Biotechnology 32:43-53 (2006)).

[0128] In addition, the flank at the 3′ end of the linker oligo- or polynucleotide increases in length to no more than 15,000 nucleotides when the 3′ end is functionally linked to a target gene which contains at its 5′ end an ATG or GTG start codon and codes for one or more polypeptide(s).

[0129] These particularly preferred embodiments of the linker polynucleotide ensure translation of RNA in an advantageous manner.

[0130] To facilitate chemical linking between the promoter polynucleotide, e.g., SEQ ID NO:1, SEQ ID NO:2, SEQ ID NO:3, SEQ ID NO:4, SEQ ID NO:5, SEQ ID NO:6, SEQ ID NO:7, or SEQ ID NO:8, the linker polynucleotide which ensures translation of RNA, and the target gene coding for one or more polypeptide(s), which has an ATG or GTG start codon at its 5′ end, functional nucleotide sequences required for cloning may be incorporated into said polynucleotides at their 5′ and 3′ ends and are at least partially retained even after said cloning.

[0131] The term “functional nucleotide sequence required for cloning” here represents any REII (type II restriction endonuclease) cleavage site present, whose sequence normally consists of from 4 to 8 nucleotides.

[0132] In addition, it should be mentioned here that site-specific mutagenesis by means of mutagenesis primers or a de novo gene synthesis (e.g. by GENEART AG (Regensburg, Germany)) of the nucleotide sequences to remove cleavage sites for restriction endonucleases may introduce silent mutations into the sequence in order to enable said cleavage sites to be used advantageously for subsequent cloning steps.

[0133] The polynucleotide resulting from the promoter according to the invention being functionally linked to the linker polynucleotide which ensures translation of RNA is also referred to as expression unit herein below.

### Expression

[0134] The disclosure furthermore relates to the use of the promoter according to the invention or of the expression unit according to the invention for expressing target genes or polynucleotides in microorganisms. The promoter according to the invention or the expression unit according to the invention ensures transcription and translation of the synthesized RNA, preferably mRNA, into a polypeptide. As used herein, the term “host cell” refers to a transformed cell of a microorganism.

[0135] The present disclosure, provides for, and includes, transformed host cells comprising the recombinant nucleic acids and recombinant vectors described in detail above. The present disclosure further provides for, and includes, host cells transformed with two recombinant nucleic acids. In an embodiment, the host cells are transformed with three recombinant nucleic acids. As provided above, the nucleic acids may be selected from biosynthetic pathways based on the overall effect on the yield of the desired product. There is no practical limit the number of recombinant nucleic acids that may be incorporated into the host cells of the present specification. Expression is preferably carried out in microorganisms of the genus Corynebacterium. Preference is given to strains within the genus Corynebacterium which are based on the following species: C. efficiens, with the deposited type strain being DSM44549; C. glutamicum, with the deposited type strain being ATCC13032; and C. ammoniagenes, with the deposited type strain being ATCC6871. Very particular preference is given to the species C. glutamicum. In this way it is possible to express polynucleotides that code for polypeptides having a property, preferably enzyme activity, which are not present or detectable in the corresponding host. Thus, for example, Yukawa et al. describe expression of Escherichia coli genes for utilizing D-xylose in C. glutamicum R under the control of the constitutive Ptrc promoter (Applied Microbiology and Biotechnology 81, 691-699 (2008)).

[0136] The present specification provides for, and includes host cells such as C. glutamicum having two or more genes of a biosynthetic pathway under the control of the promoter polynucleotide sequences described above. In various embodiments, one or more target genes (e.g., ancillary target genes, and/or shell 2, and/or shell 3, and/or 4 target genes) are placed under the control of a promoter polynucleotide sequence having as sequence of SEQ ID NOs:1 to 8 as described above. In other embodiments, one or more target genes are placed under the control of a promoter polynucleotide sequence having as sequence of SEQ ID NOs:1, 5 or 7 as described above.

[0137] In certain embodiments according to the present specification, C. glutamicum host cells have two target genes under the control of the promoters having sequences of SEQ ID NOs:1 to 8. In certain other embodiments according to the present specification, C. glutamicum host cells have two target genes under the control of the promoters having sequences of SEQ ID NOs:1, 5 or 7. Using homologous recombination, the promoters of the present disclosure replace the endogenous promoter and endogenous sequence to prepare a promoter functionally linked to a heterologous gene. One of ordinary skill in the art would recognize that the recombination results in a replacement of the endogenous promoter while retaining the gene in its native locus. Specific non-limiting examples are illustrated below in Table 8. Multiple promoter-heterologous target pairs (e.g., promoter cassettes) can be readily incorporated into the genome of a host cell. In an embodiment, the promoter cassettes can be incorporated into host cells sequentially. In certain embodiments, the recombinant vectors of the present disclosure provide for two or more different promoter cassettes in a single construct. The present specification provides no practical limit to the number of promoter replacements that can be developed using the described methods.

[0138] Also described herein is a plurality of host cells comprising a promoter ladder, wherein one cell of the plurality comprises a first promoter polynucleotide operably linked to a heterologous target gene, e.g., an ancillary target gene, a shell 2 target gene, a shell 3 target gene, or a shell 4 target gene, and a second cell of the plurality comprises a second promoter polynucleotide operably linked to the same heterologous target gene, wherein the first and second promoter polynucleotides are different promoter polynucleotides of the promoter ladder.

[0139] In some cases, the plurality of host cells further comprise a third cell of the plurality comprising a third promoter polynucleotide operably linked to the same heterologous target gene, wherein the third promoter polynucleotide is a promoter polynucleotide of the promoter ladder that is different from the first and second promoter polynucleotides. In some cases, the plurality of host cells further comprise a fourth cell of the plurality comprising a fourth promoter polynucleotide operably linked to the same heterologous target gene, wherein the fourth promoter polynucleotide is a promoter polynucleotide of the promoter ladder that is different from the first, second, and third promoter polynucleotides. In some cases, the plurality of host cells further comprise a fifth cell of the plurality comprising a fifth promoter polynucleotide operably linked to the same heterologous target gene, wherein the fifth promoter polynucleotide is a promoter polynucleotide of the promoter ladder that is different from the first, second, third, and fourth promoter polynucleotides. In some cases, the plurality of host cells further comprise a sixth cell of the plurality comprising a sixth promoter polynucleotide operably linked to the same heterologous target gene, wherein the sixth promoter polynucleotide is a promoter polynucleotide of the promoter ladder that is different from the first, second, third, fourth, and fifth promoter polynucleotides. In some cases, the plurality of host cells further comprise a seventh cell of the plurality comprising a seventh promoter polynucleotide operably linked to the same heterologous target gene, wherein the seventh promoter polynucleotide is a promoter polynucleotide of the promoter ladder that is different from the first, second, third, fourth, fifth, and sixth promoter polynucleotides. In some cases, the plurality of host cells further comprise an eighth cell of the plurality comprising an eighth promoter polynucleotide operably linked to the same heterologous target gene, wherein the eighth promoter polynucleotide is a promoter polynucleotide of the promoter ladder that is different from the first, second, third, fourth, fifth, sixth, and seventh promoter polynucleotides.

[0140] In some cases each of the first, second, third, fourth, fifth, sixth, seventh, and/or eighth promoter polynucleotide of the promoter ladder is selected from SEQ ID NO:1-8. In some cases, the promoter polynucleotides of the promoter ladder are selected from SEQ ID NO:1, 5, and 7. The number of cells in the plurality can comprise at least about 1×10⁵, 1×10⁶, or 1×10⁷ cells.

[0141] In an embodiment the host cell is a transgenic C. glutamicum host cell comprising the promoter cassettes Pcg0007-lysA and Pcg3121-pgi. In an embodiment the host cell is a transgenic C. glutamicum host cell comprising the promoter cassettes Pcg1860-pyc and Pcg0007-zwf. In an embodiment the host cell is a transgenic C. glutamicum host cell comprising the promoter cassettes Pcg0007-lysA and Pcg0007-zwf. In an embodiment the host cell is a transgenic C. glutamicum host cell comprising the promoter cassettes Pcg3121-pck and Pcg0007-zwf. In an embodiment the host cell is a transgenic C. glutamicum host cell comprising the promoter cassettes Pcg0007_39-ppc and Pcg0007-zwf. In an embodiment the host cell is a transgenic C. glutamicum host cell comprising the promoter cassettes Pcg3121-pck and Pcg3121-pgi. In an embodiment the host cell is a transgenic C. glutamicum host cell comprising the promoter cassettes Pcg3381-ddh and Pcg0007-zwf. In an embodiment the host cell is a transgenic C. glutamicum host cell comprising the promoter cassettes Pcg0007_265-dapB and Pcg0007-zwf. In an embodiment the host cell is a transgenic C. glutamicum host cell comprising the promoter cassettes Pcg0007-zwf and Pcg3121-pgi. In an embodiment the host cell is a transgenic C. glutamicum host cell comprising the promoter cassettes Pcg3381-ddh and Pcg3121-pgi. In an embodiment the host cell is a transgenic C. glutamicum host cell comprising the promoter cassettes Pcg3121-pgi and Pcg1860-pyc. In an embodiment the host cell is a transgenic C. glutamicum host cell comprising the promoter cassettes Pcg1860-pyc and Pcg0007_265-dapB. In an embodiment the host cell is a transgenic C. glutamicum host cell comprising the promoter cassettes Pcg1860-pyc and Pcg0007-lysA. In an embodiment the host cell is a transgenic C. glutamicum host cell comprising the promoter cassettes Pcg1860-asd and Pcg0007-zwf. In an embodiment the host cell is a transgenic C. glutamicum host cell comprising the promoter cassettes Pcg0007_265-dapB and Pcg3121-pgi. In an embodiment the host cell is a transgenic C. glutamicum host cell comprising the promoter cassettes Pcg1860-pyc and Pcg1860-asd. In an embodiment the host cell is a transgenic C. glutamicum host cell comprising the promoter cassettes Pcg3381-aspB and Pcg1860-pyc. In an embodiment the host cell is a transgenic C. glutamicum host cell comprising the promoter cassettes Pcg3381-fbp and Pcg1860-pyc. In an embodiment the host cell is a transgenic C. glutamicum host cell comprising the promoter cassettes Pcg3381-ddh and Pcg3381-fbp. In an embodiment the host cell is a transgenic C. glutamicum host cell comprising the promoter cassettes Pcg0755-ptsG and Pcg3121-pgi. In an embodiment the host cell is a transgenic C. glutamicum host cell comprising the promoter cassettes Pcg1860-pyc and Pcg3121-pck. In an embodiment the host cell is a transgenic C. glutamicum host cell comprising the promoter cassettes Pcg1860-asd and Pcg3121-pgi. In an embodiment the host cell is a transgenic C. glutamicum host cell comprising the promoter cassettes Pcg1860-asd and Pcg33 81-fbp. In an embodiment the host cell is a transgenic C. glutamicum host cell comprising the promoter cassettes Pcg0007_39-lysE and Pcg3381-fbp. In an embodiment the host cell is a transgenic C. glutamicum host cell comprising the promoter cassettes Pcg3381-fbp and Pcg0007-lysA. In an embodiment the host cell is a transgenic C. glutamicum host cell comprising the promoter cassettes Pcg0007_39-lysE and Pcg1860-pyc. In an embodiment the host cell is a transgenic C. glutamicum host cell comprising the promoter cassettes Pcg3121-pgi and Pcg3381-fbp. In an embodiment the host cell is a transgenic C. glutamicum host cell comprising the promoter cassettes Pcg3121-pck and Pcg0007-lysA. In an embodiment the host cell is a transgenic C. glutamicum host cell comprising the promoter cassettes Pcg0007-lysA and Pcg0007_265-dapB. In an embodiment the host cell is a transgenic C. glutamicum host cell comprising the promoter cassettes Pcg0007_265-dapB and Pcg1860-asd. In an embodiment the host cell is a transgenic C. glutamicum host cell comprising the promoter cassettes Pcg3121-pgi and Pcg0007_265-dapD. In an embodiment the host cell is a transgenic C. glutamicum host cell comprising the promoter cassettes Pcg0007-lysA and Pcg3381-ddh. In an embodiment the host cell is a transgenic C. glutamicum host cell comprising the promoter cassettes Pcg3121-pck and Pcg1860-asd. In an embodiment the host cell is a transgenic C. glutamicum host cell comprising the promoter cassettes Pcg0007-lysA and Pcg1860-asd. In an embodiment the host cell is a transgenic C. glutamicum host cell comprising the promoter cassettes Pcg3121-pck and Pcg0007_265-dapB. In an embodiment the host cell is a transgenic C. glutamicum host cell comprising the promoter cassettes Pcg3381-ddh and Pcg1860-asd. In an embodiment the host cell is a transgenic C. glutamicum host cell comprising the promoter cassettes Pcg0007_39-ppc and Pcg1860-asd. In an embodiment the host cell is a transgenic C. glutamicum host cell comprising the promoter cassettes Pcg0007_39-ppc and Pcg0007-lysA. In an embodiment the host cell is a transgenic C. glutamicum host cell comprising the promoter cassettes Pcg3381-ddh and Pcg0007_265-dapB. In an embodiment the host cell is a transgenic C. glutamicum host cell comprising the promoter cassettes Pcg0007_265-dapB and Pcg3381-fbp. In an embodiment the host cell is a transgenic C. glutamicum host cell comprising the promoter cassettes Pcg0007_39-ppc and Pcg0007_265-dapB. In an embodiment the host cell is a transgenic C. glutamicum host cell comprising the promoter cassettes Pcg3381-aspB and Pcg3121-pck. In an embodiment the host cell is a transgenic C. glutamicum host cell comprising the promoter cassettes Pcg0007_265-dapB and Pcg0007_265-dapD. In an embodiment the host cell is a transgenic C. glutamicum host cell comprising the promoter cassettes Pcg0007_39-lysE and Pcg3381-aspB. In an embodiment the host cell is a transgenic C. glutamicum host cell comprising the promoter cassettes Pcg0007_39-lysE and Pcg0007_265-dapD. In an embodiment the host cell is a transgenic C. glutamicum host cell comprising the promoter cassettes Pcg3381-aspB and Pcg0007_265-dapB. In an embodiment the host cell is a transgenic C. glutamicum host cell comprising the promoter cassettes Pcg1860-asd and Pcg0007_265-dapD. In an embodiment the host cell is a transgenic C. glutamicum host cell comprising the promoter cassettes Pcg3381-aspB and Pcg0007-lysA. In an embodiment the host cell is a transgenic C. glutamicum host cell comprising the promoter cassettes Pcg3381-aspB and Pcg3381-ddh. In an embodiment the host cell is a transgenic C. glutamicum host cell comprising the promoter cassettes Pcg0755-ptsG and Pcg1860-pyc. In an embodiment the host cell is a transgenic C. glutamicum host cell comprising the promoter cassettes Pcg0755-ptsG and Pcg3381-fbp. In an embodiment the host cell is a transgenic C. glutamicum host cell comprising the promoter cassettes Pcg0007-zwf and Pcg3381-fbp. In an embodiment the host cell is a transgenic C. glutamicum host cell comprising the promoter cassettes Pcg0755-ptsG and Pcg0007_265-dapD.

[0142] The present disclosure provides for, and includes, host cells having three or more promoter cassettes as described above. In an embodiment, the host cell includes the Pcg0007_39-zwf, Pcg0007_39-lysA and Pcg1860-pyc promoter cassettes. In an embodiment, the host cell is a C. glutamicum host cell.

[0143] In an embodiment, the host cell includes any one of the foregoing promoter cassettes, and/or includes pcg0007_39-dnak; pcg0007_39-cg0074; pcg3121-cg0074; pcg1860-rhle_609; pcg3121-cg1144; pcg1860-rhle_609; pcg0007_39-cg2899_2194; pcg0007_39-cg1486; pcg0007_39-cg2766; pcg0007_39-cmk; pcg0007_39-rpob_383; pcg0007_39-ddl; pcg0007_39-cg0027; pcg0007_39-ddl; pcg0007_39-rpob_383; pcg0007_39-rpob_383; pcg0007_39-cg0027; pcg1860-cg1144; pcg0007_39-cg0725; pcg0007_39-cg0027; pcg0007_39-cg1527; pcg0007_39-ddl; pcg0007_39-rpob_383; pcg0007_39-cg0725; pcg0007_39-cg0725; pcg0007_39-ddl; pcg0007_39-cg0725; pcg0007_39-cg2766; pcg0007_39-cg0725; pcg0007_39-hspr; pcg0007_39-cg3352; pcg0007_39-cg2899_2194; pcg0007_39-cg2766; pcg0007_39-cg2766; pcg0007_39-cg2965; pcg0007_39-rpob_383; pcg0007_39-cg2766; pcg0007_39-cg2766; pcg0007_39-cg2899_2194; pcg0007_39-cg0074; pcg3121-cg0074; pcg0007_39-cg2766; pcg3121-cg1144; pcg0007_39-cg2766; pcg0007_39-cg2766; pcg0007_39-cg2899; pcg0007_39-rho; pcg0007_39-cg2766; pcg0007_39-cg2766; pcg0007_39-cg0725; pcg1860-cg1144; pcg0007_39-cg2766 pcg0007_39-cg2766; pcg0007_39-urer; pcg0007_39-nusg; pcg3121-mutm2_2522; pcg0007_39-ddl; pcg1860-cg1144; pcg0007_39-cg2899; pcg0007_39-cg2965; pcg0007_39-ddl; pcg3121-mutm2_2522; pcg0007_39-cg2766; pcg0007_39-cg2766; pcg0007_39-cg2766; pcg0007_39-cg2766; pcg0007_39-cg2766; pcg0007_39-cg2766; pcg0007_39-tyra; pcg0007_39-cg1486; pcg0007_39-cg2899; pcg0007_39-cg0027; pcg0007_39-ncg11511; pcg0007_39-ncg11262; pcg0007_39-cg3419; pcg0007_39-cg1486; pcg0007_39-cg3210; pcg0007_39-cg1486; pcg0007_39-cg1486; pcg0007_39-cg1486; pcg0007_39-cg1486; pcg0007_39-ncg10767; pcg0007_39-ncg12481; pcg0007_39-tyra; pcg0007_39-cg1486; pcg0007_39-ncg11511; pcg0007_39-ncg10827; pcg0007_39-tyra; pcg0007_39-cg1486; pcg0007_39-ncg11262; pcg0007_39-cg1486; pcg0007_39-ncg11262; pcg0007_39-ncg11262; pcg0007_39-ncg10767; pcg0007_39-ncg10304; pcg0007_39-ncg11511; pcg0007_39-ncg10767; pcg0007_39-ncg11262; pcg0007_39-ncg11511; pcg0007_39-ncg10767; pcg0007_39-ncg10767; pcg0007_39-ncg11262; pcg0007_39-cg1486; pcg0007_39-ncg11262; pcg0007_39-ncg10304; pcg0007_39-ncg11262; pcg0007_39-ncg10767; pcg0007_39-ncg11262, or a combination of 1, 2, 3, 4, 5, 6, 7, 8, 9, 10, or all thereof.

[0144] The promoter according to the invention or the expression unit according to the invention is furthermore used for improving the performance characteristics of microorganisms, which can include, for example, yield, titer, productivity, by-product elimination, tolerance to process excursions, optimal growth temperature and growth rate. In some embodiments, the promoter according to the invention or the expression unit according to the invention is used for up-regulating a target gene in a microorganism (overexpression). Overexpression generally means an increase in the intracellular concentration or activity of a ribonucleic acid, a protein (polypeptide) or an enzyme in comparison with the starting strain (parent strain) or wild-type strain, if the latter is the starting strain. In some embodiments, the promoter according to the invention or the expression unit according to the invention is used for down-regulating a target gene in a microorganism (underexpression). Underexpression generally means an decrease in the intracellular concentration or activity of a ribonucleic acid, a protein (polypeptide) or an enzyme in comparison with the starting strain (parent strain) or wild-type strain, if the latter is the starting strain. In some embodiments, a combination of promoters and/or expression units according to the invention are used for regulating expression of more than one target gene in a microorganism, wherein each target gene is either up-regulated or down-regulated. In some embodiments the target genes up- or down-regulated by the combination of promoters and/or expression units are part of the same metabolic pathway. In some embodiments the target genes up- or down-regulated by the combination of promoters and/or expression units are not part of the same metabolic pathway.

[0145] The promoters described herein can be used in combination with other methods very well-known in the art for attenuating (reducing or eliminating) the intracellular activity of one or more enzymes (proteins) in a microorganism which are coded by the corresponding DNA, for example by using a weak promoter or using a gene, or allele, which codes for a corresponding enzyme with a low activity, or inactivates the corresponding gene or enzyme (protein), and optionally combining these measures.

[0146] The reduction in gene expression can take place by suitable culturing or by genetic modification (mutation) of the signal structures of gene expression. Signal structures of gene expression are, for example, repressor genes, activator genes, operators, promoters, attenuators, ribosome binding sites, the start codon and terminators. The expert can find information on this e.g. in the patent application WO 96/15246, in Boyd and Murphy (Journal of Bacteriology 170: 5949 (1988)), in Voskuil and Chambliss (Nucleic Acids Research 26: 3548 (1998), in Jensen and Hammer (Biotechnology and Bioengineering 58: 191 (1998)), in Patek et al. (Microbiology 142: 1297 (1996)), Vašicová et al. (Journal of Bacteriology 181: 6188 (1999)) and in known textbooks of genetics and molecular biology, such as e.g. the textbook by Knippers (“Molekulare Genetik [Molecular Genetics]”, 6th edition, Georg Thieme Verlag, Stuttgart, Germany, 1995) or that by Winnacker (“Gene und Klone [Genes and Clones]”, VCH Verlagsgesellschaft, Weinheim, Germany, 1990).

[0147] Mutations which lead to a change or reduction in the catalytic properties of enzyme proteins are known from the prior art; examples which may be mentioned are the works by Qiu and Goodman (Journal of Biological Chemistry 272: 8611-8617 (1997)), Sugimoto et al. (Bioscience Biotechnology and Biochemistry 61: 1760-1762 (1997)) and Möckel (“Die Threonindehydratase aus Corynebacterium glutamicum: Aufhebung der allosterischen Regulation und Struktur des Enzyms [Threonine dehydratase from Corynebacterium glutamicum: Cancelling the allosteric regulation and structure of the enzyme]”, Reports from the Jülich Research Centre, Jül-2906, ISSN09442952, Jülich, Germany, 1994). Comprehensive descriptions can be found in known textbooks of genetics and molecular biology, such as e.g. that by Hagemann (“Allgemeine Genetik [General Genetics]”, Gustav Fischer Verlag, Stuttgart, 1986).

[0148] Possible mutations are transitions, transversions, insertions and deletions. Depending on the effect of the amino acid exchange on the enzyme activity, missense mutations or nonsense mutations are referred to. Insertions or deletions of at least one base pair in a gene lead to frame shift mutations, as a consequence of which incorrect amino acids are incorporated or translation is interrupted prematurely. Deletions of several codons typically lead to a complete loss of the enzyme activity. Instructions on generation of such mutations are prior art and can be found in known textbooks of genetics and molecular biology, such as e.g. the textbook by Knippers (“Molekulare Genetik [Molecular Genetics]”, 6th edition, Georg Thieme Verlag, Stuttgart, Germany, 1995), that by Winnacker (“Gene und Klone [Genes and Clones]”, VCH Verlagsgesellschaft, Weinheim, Germany, 1990) or that by Hagemann (“Allgemeine Genetik [General Genetics]”, Gustav Fischer Verlag, Stuttgart, 1986). A common method of mutating genes of C. glutamicum is the method of gene disruption and gene replacement described by Schwarzer and Pühler (Bio/Technology 9, 84-87 (1991)).

[0149] In the method of gene disruption a central part of the coding region of the gene of interest is cloned in a plasmid vector which can replicate in a host (typically E. coli), but not in C. glutamicum. Possible vectors are, for example, pSUP301 (Simon et al., Bio/Technology 1, 784-791 (1983)), pK18mob or pK19mob (Schafer et al., Gene 145, 69-73 (1994)), pK18mobsacB or pK19mobsacB (Jager et al., Journal of Bacteriology 174: 5462-65 (1992)), pGEM-T (Promega corporation, Madison, Wis., USA), pCR2.1-TOPO (Shuman (1994). Journal of Biological Chemistry 269:32678-84; U.S. Pat. No. 5,487,993), pCR®Blunt (Invitrogen, Groningen, Holland; Bernard et al., Journal of Molecular Biology, 234: 534-541 (1993)) or pEM1 (Schrumpf et al, 1991, Journal of Bacteriology 173:4510-4516). The plasmid vector which contains the central part of the coding region of the gene is then transferred into the desired strain of C. glutamicum by conjugation or transformation. The method of conjugation is described, for example, by Schafer et al. (Applied and Environmental Microbiology 60, 756-759 (1994)). Methods for transformation are described, for example, by Thierbach et al. (Applied Microbiology and Biotechnology 29, 356-362 (1988)), Dunican and Shivnan (Bio/Technology 7, 1067-1070 (1989)) and Tauch et al. (FEMS Microbiological Letters 123, 343-347 (1994)). After homologous recombination by means of a “cross-over” event, the coding region of the gene in question is interrupted by the vector sequence and two incomplete alleles are obtained, one lacking the 3′ end and one lacking the 5′ end. This method has been used, for example, by Fitzpatrick et al. (Applied Microbiology and Biotechnology 42, 575-580 (1994)) to eliminate the recA gene of C. glutamicum.

[0150] In the method of gene replacement, a mutation, such as e.g. a deletion, insertion or base exchange, is established in vitro in the gene of interest. The allele prepared is in turn cloned in a vector which is not replicative for C. glutamicum and this is then transferred into the desired host of C. glutamicum by transformation or conjugation. After homologous recombination by means of a first “cross-over” event which effects integration and a suitable second “cross-over” event which effects excision in the target gene or in the target sequence, the incorporation of the mutation or of the allele is achieved. This method was used, for example, by Peters-Wendisch (Microbiology 144, 915-927 (1998)) to eliminate the pyc gene of C. glutamicum by a deletion.

[0151] The promoters described herein can be used in combination with other methods very well-known in the art for raising (enhancing) the intracellular activity of one or more enzymes in a microorganism that are coded by the corresponding DNA, by for example increasing the number of copies of the gene or genes, using a strong promoter, or using a gene that codes for a corresponding enzyme having a high activity, and optionally combining these measures.

[0152] In order to achieve an overexpression the number of copies of the corresponding genes can be increased, or alternatively the promoter and regulation region or the ribosome binding site located upstream of the structure gene can be mutated. Expression cassettes that are incorporated upstream of the structure gene act in the same way. By means of inducible promoters it is in addition possible to increase the expression in the course of the enzymatic amino acid production. The expression is similarly improved by measures aimed at prolonging the lifetime of the m-RNA. Furthermore, the enzyme activity is also enhanced by preventing the degradation of the enzyme protein. The genes or gene constructs may either be present in plasmids having different numbers of copies, or may be integrated and amplified in the chromosome. Alternatively, an overexpression of the relevant genes may furthermore be achieved by altering the composition of the media and the culture conditions.

[0153] The person skilled in the art can find details on the above in, inter alia, Martin et al. (Bio/Technology 5, 137-146 (1987)), in Guerrero et al. (Gene 138, 35-41 (1994)), Tsuchiya and Morinaga (Bio/Technology 6, 428-430 (1988)), in Eikmanns et al. (Gene 102, 93-98 (1991)), in European Patent Specification 0 472 869, in U.S. Pat. No. 4,601,893, in Schwarzer and Pühler (Bio/Technology 9, 84-87 (1991), in Reinscheid et al. (Applied and Environmental Microbiology 60, 126-132 (1994)), in LaBarre et al. (Journal of Bacteriology 175, 1001-1007 (1993)), in Patent Application WO 96/15246, in Malumbres et al. (Gene 134, 15-24 (1993)), in Japanese laid open Specification JP-A-10-229891, in Jensen and Hammer (Biotechnology and Bioengineering 58, 191-195 (1998)), in Makrides (Microbiological Reviews 60:512-538 (1996)) and in known textbooks on genetics and molecular biology.

[0154] Genes may be overexpressed for example by means of episomal plasmids. Suitable plasmids are those that are replicated in coryneform bacteria. Numerous known plasmid vectors, such as for example pZ1 (Menkel et al., Applied and Environmental Microbiology (1989) 64: 549-554), pEKEx1 (Eikmanns et al., Gene 102:93-98 (1991)) or pHS2-1 (Sonnen et al., Gene 107:69-74 (1991)) are based on the cryptic plasmids pHM1519, pBL1 or pGA1. Other plasmid vectors, such as for example those based on pCG4 (U.S. Pat. No. 4,489,160), or pNG2 (Serwold-Davis et al., FEMS Microbiology Letters 66, 119-124 (1990)), or pAG1 (U.S. Pat. No. 5,158,891) may be used in a similar way.

[0155] Furthermore, also suitable are those plasmid vectors with the aid of which the process of gene amplification by integration in the chromosome can be employed, such as has been described for example by Reinscheid et al. (Applied and Environmental Microbiology 60, 126-132 (1994)) for the duplication and amplification of the hom-thrB operon. In this method the complete gene is cloned into a plasmid vector that can replicate in a host (typically E. coli) but not in C. glutamicum. Suitable vectors are for example pSUP301 (Simon et al., Bio/Technology 1, 784-791 (1983)), pK18mob or pK19 mob (Schafer et al., Gene 145, 69-73 (1994)), pGEM-T (Promega Corporation, Madison, Wis., USA), pCR2.1-TOPO (Shuman (1994). Journal of Biological Chemistry 269:32678-84; U.S. Pat. No. 5,487,993), pCR®Blunt (Invitrogen, Groningen, Netherlands; Bernard et al., Journal of Molecular Biology, 234: 534-541 (1993)), pEM1 (Schrumpf et al, 1991, Journal of Bacteriology 173:4510-4516) or pBGS8 (Sprat et al., 1986, Gene 41: 337-342). The plasmid vector that contains the gene to be amplified is then transferred by conjugation or transformation into the desired strain of C. glutamicum. The method of conjugation is described for example in Schafer et al. (Applied and Environmental Microbiology 60, 756-759 (1994)). Transformation methods are described for example in Thierbach et al. (Applied Microbiology and Biotechnology 29, 356-362 (1988)), Dunican and Shivnan (Bio/Technology 7, 1067-1070 (1989)) and Tauch et al. (FEMS Microbiological Letters 123, 343-347 (1994)). After homologous recombination by means of a crossover event, the resulting strain contains at least two copies of the relevant gene.

[0156] Methods of regulating, i.e., either increasing or decreasing, gene expression include recombinant methods in which a microorganism is produced using a DNA molecule provided in vitro. Such DNA molecules comprise, for example, promoters, expression cassettes, genes, alleles, coding regions, etc. They are introduced into the desired microorganisms by methods of transformation, conjugation, transduction or similar methods.

[0157] In the case of the present disclosure, the promoters are preferably a polynucleotide of SEQ ID NO:1, SEQ ID NO:2, SEQ ID NO:3, SEQ ID NO:4, SEQ ID NO:5, SEQ ID NO:6, SEQ ID NO:7, or SEQ ID NO:8, and the expression cassettes are preferably a polynucleotide of SEQ ID NO:1, SEQ ID NO:2, SEQ ID NO:3, SEQ ID NO:4, SEQ ID NO:5, SEQ ID NO:6, SEQ ID NO:7, or SEQ ID NO:8 which, via the nucleotide at its 3′ end, are functionally linked to a linker polynucleotide which ensures translation of RNA.

[0158] The measures of overexpression using the promoter according to the invention or the expression unit according to the invention increase the activity or concentration of the corresponding polypeptide usually by at least 10%, 25%, 50%, 75%, 100%, 150%, 200%, 300%, 400% or 500%, preferably by no more than 1,000%, 2,000%, 4,000%, 10,000% or 20,000%, based on the activity or concentration of said polypeptide in the strain prior to the measure resulting in overexpression.

[0159] The extent of expression or overexpression may be established by measuring the amount of mRNA transcribed from the gene, by determining the amount of polypeptide and by determining enzyme activity.

[0160] The amount of mRNA may be determined inter alia by using the methods of “Northern Blotting” and of quantitative RT-PCR. Quantitative RT-PCR involves reverse transcription which precedes the polymerase chain reaction. For this, the LightCycler™ System from Roche Diagnostics (Boehringer Mannheim GmbH, Roche Molecular Biochemicals, Mannheim, Germany) may be used, as described in Jungwirth et al. (FEMS Microbiology Letters 281, 190-197 (2008)), for example. The concentration of the protein may be determined via 1- and 2-dimensional protein gel fractionation and subsequent optical identification of the protein concentration using appropriate evaluation software in the gel. A customary method of preparing protein gels for coryneform bacteria and of identifying said proteins is the procedure described by Hermann et al. (Electrophoresis, 22:1712-23 (2001)). The protein concentration may likewise be determined by Western-Blot hybridization using an antibody specific for the protein to be detected (Sambrook et al., Molecular cloning: a laboratory manual. 2nd Ed. Cold Spring Harbor Laboratory Press, Cold Spring Harbor, N.Y., 1989) and subsequent optical evaluation using appropriate software for concentration determination (Lohaus and Meyer (1998) Biospektrum 5:32-39; Lottspeich, Angewandte Chemie 321: 2630-2647 (1999)). The statistical significance of the data collected is determined by means of a T test (Gosset, Biometrika 6(1): 1-25 (1908)).

[0161] The measure of overexpressing target genes using the promoter according to the invention may be combined in a suitable manner with further overexpression measures. Overexpression is achieved by a multiplicity of methods available in the prior art. These include increasing the copy number in addition to modifying the nucleotide sequences which direct or control expression of the gene. The copy number may be increased by means of plasmids which replicate in the cytoplasm of the microorganism. To this end, an abundance of plasmids are described in the prior art for very different groups of microorganisms, which plasmids can be used for setting the desired increase in the copy number of the gene. Plasmids suitable for the genus Corynebacterium are described, for example, in Tauch et al. (Journal of Biotechnology 104 (1-3), 27-40, (2003)), and in Stansen et al. (Applied and Environmental Microbiology 71, 5920-5928 (2005)).

[0162] The copy number may furthermore be increased by at least one (1) copy by introducing further copies into the chromosome of the microorganism. Methods suitable for the genus Corynebacterium are described, for example, in the patents WO 03/014330, WO 03/040373 and WO 04/069996.

[0163] Gene expression may furthermore be increased by positioning a plurality of promoters upstream of the target gene or functionally linking them to the gene to be expressed and achieving increased expression in this way. Examples of this are described in the patent WO 2006/069711.

[0164] Transcription of a gene is controlled, where appropriate, by proteins which suppress (repressor proteins) or promote (activator proteins) transcription. Accordingly, overexpression can likewise be achieved by increasing the expression of activator proteins or reducing or switching off the expression of repressor proteins or else eliminating the binding sites of the repressor proteins. The rate of elongation is influenced by the codon usage, it being possible to enhance translation by utilizing codons for transfer RNAs (tRNAs) which are frequent in the starting strain. Moreover, replacing a start codon with the ATG codon most frequent in many microorganisms (77% in E. coli) may considerably improve translation, since, at the RNA level, the AUG codon is two to three times more effective than the codons GUG and UUG, for example (Khudyakov et al., FEBS Letters 232(2):369-71(1988); Reddy et al., Proceedings of the National Academy of Sciences of the USA 82(17):5656-60 (1985)). It is also possible to optimize the sequences surrounding the start codon because synergistic effects between the start codon and the flanking regions have been described (Stenström et al., Gene 273(2):259-65 (2001); Hui et al., EMBO Journal 3(3):623-9 (1984)).

[0165] Instructions for handling DNA, digestion and ligation of DNA, transformation and selection of transformants can be found inter alia in the known manual by Sambrook et al. “Molecular Cloning: A Laboratory Manual, Second Edition (Cold Spring Harbor Laboratory Press, 1989).

[0166] The disclosure also relates to vectors comprising the polynucleotides according to the invention.

[0167] Kirchner and Tauch (Journal of Biotechnology 104:287-299 (2003)) describe a selection of vectors to be used in C. glutamicum.

[0168] Homologous recombination using the vectors according to the invention allows DNA segments on the chromosome to be replaced with polynucleotides according to the invention which are transported into the cell by the vector. For efficient recombination between the circular DNA molecule of the vector and the target DNA on the chromosome, the DNA region to be replaced with the polynucleotide according to the invention is provided at the ends with nucleotide sequences homologous to the target site which determine the site of integration of the vector and of replacement of the DNA.

[0169] Thus the promoter polynucleotide according to the invention may: 1) be replaced with the native promoter at the native gene locus of the target gene in the chromosome; or 2) be integrated with the target gene at the native gene locus of the latter or at another gene locus.

[0170] “Replacement of the native promoter at the native gene locus of the target gene” means the fact that the naturally occurring promoter of the gene which usually is naturally present by way of a single copy at its gene locus in the corresponding wild type or corresponding starting organism in the form of its nucleotide sequence is replaced. “Another gene locus” means a gene locus whose nucleotide sequence is different from the sequence of the target gene. Said other gene locus or the nucleotide sequence at said other gene locus is preferably located within the chromosome and normally is not essential for growth and for production of the desired chemical compounds. It is furthermore possible to use intergenic regions within the chromosome, i.e. nucleotide sequences without coding function.

[0171] Expression or overexpression is preferably carried out in microorganisms of the genus Corynebacterium. Within the genus Corynebacterium, preference is given to strains based on the following species: C. efficiens, with the deposited type strain being DSM44549, C. glutamicum, with the deposited type strain being ATCC13032, and C. ammoniagenes, with the deposited type strain being ATCC6871. Very particular preference is given to the species C. glutamicum.

[0172] Suitable strains of the genus Corynebacterium, in particular of the species Corynebacterium glutamicum, are in particular the known wild-type strains: Corynebacterium glutamicum ATCC13032, Corynebacterium acetoglutamicum ATCC15806, Corynebacterium acetoacidophilum ATCC13870, Corynebacterium melassecola ATCC17965, Corynebacterium thermoaminogenes FERM BP-1539, Brevibacterium flavum ATCC14067, Brevibacterium lactofermentum ATCC13869, and Brevibacterium divaricatum ATCC14020; and L-amino acid-producing mutants, or strains, prepared therefrom, such as, for example, the L-lysine-producing strains: Corynebacterium glutamicum FERM-P 1709, Brevibacterium flavum FERM-P 1708, Brevibacterium lactofermentum FERM-P 1712, Corynebacterium glutamicum FERM-P 6463, Corynebacterium glutamicum FERM-P 6464, Corynebacterium glutamicum DM58-1, Corynebacterium glutamicum DG52-5, Corynebacterium glutamicum DSM5714, and Corynebacterium glutamicum DSM12866.

[0173] The term “Micrococcus glutamicus” has also been in use for C. glutamicum. Some representatives of the species C. efficiens have also been referred to as C. thermoaminogenes in the prior art, such as the strain FERM BP-1539, for example.

[0174] The microorganisms or strains (starting strains) employed for the expression or overexpression measures according to the invention preferably already possess the ability to secrete a desired fine chemical into the surrounding nutrient medium and accumulate there. The expression “to produce” is also used for this herein below. More specifically, the strains employed for the overexpression measures possess the ability to accumulate the desired fine chemical in concentrations of at least 0.10 g/L, at least 0.25 g/L, at least 0.5 g/L, at least 1.0 g/L, at least 1.5 g/L, at least 2.0 g/L, at least 4.0 g/L, or at least 10.0 g/L in no more than 120 hours, no more than 96 hours, no more than 48 hours, no more than 36 hours, no more than 24 hours, or no more than 12 hours in the cell or in the nutrient medium. The starting strains are preferably strains prepared by mutagenesis and selection, by recombinant DNA technologies or by a combination of both methods.

[0175] A person skilled in the art understands that a microorganism suitable for the measures of the invention may also be obtained by firstly employing the promoter according to the invention, e.g., SEQ ID NO:1, SEQ ID NO:2, SEQ ID NO:3, SEQ ID NO:4, SEQ ID NO:5, SEQ ID NO:6, SEQ ID NO:7, or SEQ ID NO:8 for overexpression or underexpression of the target genes in a wild strain such as, for example, the C. glutamicum type strain ATCC 13032 or the strain ATCC 14067, and then, by means of further genetic measures described in the prior art, causing the microorganism to produce the desired fine chemical(s).

[0176] The term “biomolecules” means with regard to the measures of the invention amino acids, organic acids, vitamins, nucleosides and nucleotides. Particular preference is given to proteinogenic amino acids, non-proteinogenic amino acids, macromolecules, and organic acids.

[0177] “Proteinogenic amino acids” mean the amino acids which occur in natural proteins, i.e. in proteins of microorganisms, plants, animals and humans. They serve as structural units for proteins in which they are linked to one another via peptide bonds.

[0178] Where L-amino acids or amino acids are mentioned hereinbelow, they are to be understood as meaning one or more amino acids, including their salts, selected from the group L-asparagine, L-threonine, L-serine, L-glutamate, L-glycine, L-alanine, L-cysteine, L-valine, L-methionine, L-isoleucine, L-leucine, L-tyrosine, L-phenylalanine, L-histidine, L-lysine, L-tryptophan and L-arginine. L-lysine is especially preferred. L-Amino acids, in particular lysine, are used in human medicine and in the pharmaceuticals industry, in the foodstuffs industry and very particularly in animal nutrition. There is therefore a general interest in providing new improved processes for the preparation of amino acids, in particular L-lysine.

[0179] The terms protein and polypeptide are interchangeable.

[0180] The present disclosure provides a microorganism which produces a fine chemical, said microorganism having increased expression of one or more genes in comparison to the particular starting strain by using a promoter of a promoter ladder, such as a promoter selected from SEQ ID NO:1, SEQ ID NO:2, SEQ ID NO:3, SEQ ID NO:4, SEQ ID NO:5, SEQ ID NO:6, SEQ ID NO:7, or SEQ ID NO:8.

### Fermentative Preparation

[0181] The present disclosure furthermore provides a process for fermentative preparation of a fine chemical, comprising the steps of:

[0182] a) culturing the above-described microorganism according to the present disclosure in a suitable medium, resulting in a fermentation broth; and

[0183] b) concentrating the fine chemical in the fermentation broth of a) and/or in the cells of the microorganism.

[0184] Preference is given here to obtaining from the fine chemical-containing fermentation broth the fine chemical or a liquid or solid fine chemical-containing product. The microorganisms produced may be cultured continuously—as described, for example, in WO 05/021772—or discontinuously in a batch process (batch cultivation) or in a fed-batch or repeated fed-batch process for the purpose of producing the desired organic-chemical compound. A summary of a general nature about known cultivation methods is available in the textbook by Chmiel (Bioprozeßtechnik. 1: Einführung in die Bioverfahrenstechnik (Gustav Fischer Verlag, Stuttgart, 1991)) or in the textbook by Storhas (Bioreaktoren and periphere Einrichtungen (Vieweg Verlag, Braunschweig/Wiesbaden, 1994)).

[0185] The culture medium or fermentation medium to be used must in a suitable manner satisfy the demands of the respective strains. Descriptions of culture media for various microorganisms are present in the “Manual of Methods for General Bacteriology” of the American Society for Bacteriology (Washington D.C., USA, 1981). The terms culture medium and fermentation medium are interchangeable.

[0186] It is possible to use, as carbon source, sugars and carbohydrates such as, for example, glucose, sucrose, lactose, fructose, maltose, molasses, sucrose-containing solutions from sugar beet or sugar cane processing, starch, starch hydrolysate, and cellulose; oils and fats such as, for example, soybean oil, sunflower oil, groundnut oil and coconut fat; fatty acids such as, for example, palmitic acid, stearic acid, and linoleic acid; alcohols such as, for example, glycerol, methanol, and ethanol; and organic acids such as, for example, acetic acid or lactic acid.

[0187] It is possible to use, as nitrogen source, organic nitrogen-containing compounds such as peptones, yeast extract, meat extract, malt extract, corn steep liquor, soybean flour, and urea; or inorganic compounds such as ammonium sulfate, ammonium chloride, ammonium phosphate, ammonium carbonate, and ammonium nitrate. The nitrogen sources can be used individually or as a mixture.

[0188] It is possible to use, as phosphorus source, phosphoric acid, potassium dihydrogen phosphate or dipotassium hydrogen phosphate or the corresponding sodium-containing salts.

[0189] The culture medium may additionally comprise salts, for example in the form of chlorides or sulfates of metals such as, for example, sodium, potassium, magnesium, calcium and iron, such as, for example, magnesium sulfate or iron sulfate, which are necessary for growth. Finally, essential growth factors such as amino acids, for example homoserine and vitamins, for example thiamine, biotin or pantothenic acid, may be employed in addition to the abovementioned substances.

[0190] Said starting materials may be added to the culture in the form of a single batch or be fed in during the cultivation in a suitable manner.

[0191] The pH of the culture can be controlled by employing basic compounds such as sodium hydroxide, potassium hydroxide, ammonia, or aqueous ammonia; or acidic compounds such as phosphoric acid or sulfuric acid in a suitable manner. The pH is generally adjusted to a value of from 6.0 to 8.5, preferably 6.5 to 8. To control foaming, it is possible to employ antifoams such as, for example, fatty acid polyglycol esters. To maintain the stability of plasmids, it is possible to add to the medium suitable selective substances such as, for example, antibiotics. The fermentation is preferably carried out under aerobic conditions. In order to maintain these conditions, oxygen or oxygen-containing gas mixtures such as, for example, air are introduced into the culture. It is likewise possible to use liquids enriched with hydrogen peroxide. The fermentation is carried out, where appropriate, at elevated pressure, for example at an elevated pressure of from 0.03 to 0.2 MPa. The temperature of the culture is normally from 20° C. to 45° C. and preferably from 25° C. to 40° C., particularly preferably from 30° C. to 37° C. In batch or fed-batch processes, the cultivation is preferably continued until an amount of the desired organic-chemical compound sufficient for being recovered has formed. This aim is normally achieved within 10 hours to 160 hours. In continuous processes, longer cultivation times are possible. The activity of the microorganisms results in a concentration (accumulation) of the organic-chemical compound in the fermentation medium and/or in the cells of said microorganisms.

[0192] Examples of suitable fermentation media can be found inter alia in the U.S. Pat. Nos. 5,770,409, 5,990,350, 5,275,940, WO 2007/012078, U.S. Pat. No. 5,827,698, WO 2009/043803, U.S. Pat. Nos. 5,756,345 and 7,138,266.

[0193] Analysis of L-amino acids to determine the concentration at one or more time(s) during the fermentation can take place by separating the L-amino acids by means of ion exchange chromatography, preferably cation exchange chromatography, with subsequent post-column derivatization using ninhydrin, as described in Spackman et al. (Analytical Chemistry 30:1190-1206 (1958)). It is also possible to employ ortho-phthaldialdehyde rather than ninhydrin for post-column derivatization. An overview article on ion exchange chromatography can be found in Pickering (LC-GC Magazine of Chromatographic Science) 7(6), 484-487 (1989)).

[0194] It is likewise possible to carry out a pre-column derivatization, for example using ortho-phthaldialdehyde or phenyl isothiocyanate, and to fractionate the resulting amino acid derivatives by reversed-phase (RP) chromatography, preferably in the form of high-performance liquid chromatography (HPLC). A method of this type is described, for example, in Lindroth et al. (Analytical Chemistry 51:1167-1174 (1979)).

[0195] Detection is carried out photometrically (absorption, fluorescence).

[0196] A review regarding amino acid analysis can be found inter alia in the textbook “Bioanalytik” from Lottspeich and Zorbas (Spektrum Akademischer Verlag, Heidelberg, Germany 1998).

[0197] Determination of the concentration of α-ketoacids at one or more time point(s) in the course of the fermentation may be carried out by separating the ketoacids and other secreted products by means of ion exchange chromatography, preferably cation exchange chromatography, on a sulfonated styrene-divinylbenzene polymer in the H+ form, for example by means of 0.025 M sulfuric acid with subsequent UV detection at 215 nm (alternatively also at 230 or 275 nm). Preferably, a REZEK RFQ-Fast Fruit H+ column (Phenomenex) may be employed, but other suppliers for the separating phase (e.g. Aminex from BioRad) are feasible. Similar separations are described in application examples by the suppliers.

[0198] The performance of the processes or fermentation processes containing the promoter variants according to the invention, in terms of one or more of the parameters selected from the group of concentration (compound formed per unit volume), yield (compound formed per unit carbon source consumed), formation (compound formed per unit volume and time) and specific formation (compound formed per unit dry cell matter or dry biomass and time or compound formed per unit cellular protein and time) or else other process parameters and combinations thereof, is increased by at least 0.5%, at least 1%, at least 1.5%, at least 2%, at least 3%, at least 4%, at least 5%, at least 10%, at least 20%, at least 30%, at least 40%, at least 50%, at least 60%, at least 70%, at least 80%, at least 90%, or at least 100% based on processes or fermentation processes using microorganisms not containing the promoter variants according to the invention. This is considered to be very worthwhile in terms of a large-scale industrial process.

[0199] The fermentation measures result in a fermentation broth which contains the desired fine chemical, preferably amino acids, organic acids, vitamins, nucleosides or nucleotides.

[0200] A product containing the fine chemical is then provided or produced or recovered in liquid or solid form.

[0201] A fermentation broth means a fermentation medium or nutrient medium in which a microorganism has been cultivated for a certain time and at a certain temperature. The fermentation medium or the media employed during fermentation comprise(s) all the substances or components which ensure production of the desired compound and typically propagation and viability.

[0202] When the fermentation is complete, the resulting fermentation broth accordingly comprises:

[0203] a) the biomass (cell mass) of the microorganism, said biomass having been produced due to propagation of the cells of said microorganism;

[0204] b) the desired fine chemical formed during the fermentation;

[0205] c) the organic byproducts possibly formed during the fermentation; and

[0206] d) the constituents of the fermentation medium employed or of the starting materials, such as, for example, vitamins such as biotin or salts such as magnesium sulfate, which have not been consumed in the fermentation.

[0207] The organic byproducts include substances which are produced by the microorganisms employed in the fermentation in addition to the particular desired compound and are optionally secreted.

[0208] The fermentation broth is removed from the culture vessel or fermentation tank, collected where appropriate, and used for providing a product containing the fine chemical in liquid or solid form. The expression “recovering the fine chemical-containing product” is also used for this. In the simplest case, the fine chemical-containing fermentation broth itself, which has been removed from the fermentation tank, constitutes the recovered product.

[0209] One or more of the measures selected from the group consisting of

[0210] a) partial (>0% to <80%) to complete (100%) or virtually complete (≥80%, ≥90%, ≥95%, ≥96%, ≥97%, ≥98%, or ≥99%) removal of the water;

[0211] b) partial (>0% to <80%) to complete (100%) or virtually complete (≥80%, ≥90%, ≥95%, ≥96%, ≥97%, ≥98%, or ≥99%) removal of the biomass, the latter being optionally inactivated before removal;

[0212] c) partial (>0% to <80%) to complete (100%) or virtually complete (≥80%, ≥90%, ≥95%, ≥96%, ≥97%, ≥98%, ≥99%, ≥99.3%, or ≥99.7%) removal of the organic byproducts formed during fermentation; and

[0213] d) partial (>0%) to complete (100%) or virtually complete (≥80%, ≥90%, ≥95%, ≥96%, ≥97%, ≥98%, ≥99%, ≥99.3%, or ≥99.7%) removal of the constituents of the fermentation medium employed or of the starting materials, which have not been consumed in the fermentation, from the fermentation broth achieves concentration or purification of the desired organic-chemical compound. Products having a desired content of said compound are isolated in this way.

[0214] The partial (>0% to <80%) to complete (100%) or virtually complete (≥80% to <100%) removal of the water (measure a)) is also referred to as drying.

[0215] In one variant of the process, complete or virtually complete removal of the water, of the biomass, of the organic byproducts and of the unconsumed constituents of the fermentation medium employed results in pure (≥80% by weight, ≥90% by weight) or high-purity (≥95% by weight, ≥97% by weight, or ≥99% by weight) product forms of the desired organic-chemical compound. An abundance of technical instructions for measures a), b), c) and d) are available in the prior art.

[0216] Depending on requirements, the biomass can be removed wholly or partly from the fermentation broth by separation methods such as, for example, centrifugation, filtration, decantation or a combination thereof, or be left completely therein. Where appropriate, the biomass or the biomass-containing fermentation broth is inactivated during a suitable process step, for example by thermal treatment (heating) or by addition of acid.

[0217] In one procedure, the biomass is completely or virtually completely removed so that no (0%) or at most 30%, at most 20%, at most 10%, at most 5%, at most 1% or at most 0.1% biomass remains in the prepared product. In a further procedure, the biomass is not removed, or is removed only in small proportions, so that all (100%) or more than 70%, 80%, 90%, 95%, 99% or 99.9% biomass remains in the product prepared. In one process according to the invention, accordingly, the biomass is removed in proportions of from ≥0% to ≤100%.

[0218] Finally, the fermentation broth obtained after the fermentation can be adjusted, before or after the complete or partial removal of the biomass, to an acidic pH with an inorganic acid such as, for example, hydrochloric acid, sulfuric acid, or phosphoric acid; or organic acid such as, for example, propionic acid, so as to improve the handling properties of the final product (GB 1,439,728 or EP 1 331220). It is likewise possible to acidify the fermentation broth with the complete content of biomass. Finally, the broth can also be stabilized by adding sodium bisulfite (NaHCO₃, GB 1,439,728) or another salt, for example ammonium, alkali metal, or alkaline earth metal salt of sulfurous acid.

[0219] During the removal of the biomass, any organic or inorganic solids present in the fermentation broth are partially or completely removed. The organic byproducts dissolved in the fermentation broth, and the dissolved unconsumed constituents of the fermentation medium (starting materials), remain at least partly (>0%), preferably to an extent of at least 25%, particularly preferably to an extent of at least 50% and very particularly preferably to an extent of at least 75% in the product. Where appropriate, they also remain completely (100%) or virtually completely, meaning >95% or >98% or >99%, in the product. If a product in this sense comprises at least part of the constituents of the fermentation broth, this is also described by the term “product based on fermentation broth”.

[0220] Subsequently, water is removed from the broth, or said broth is thickened or concentrated, by known methods such as, for example, using a rotary evaporator, thin-film evaporator, falling-film evaporator, by reverse osmosis or by nanofiltration. This concentrated fermentation broth can then be worked up to free-flowing products, in particular to a fine powder or preferably coarse granules, by methods of freeze drying, spray drying, spray granulation or by other processes such as in the circulating fluidized bed, as described for example according to PCT/EP2004/006655. A desired product is isolated where appropriate from the resulting granules by screening or dust removal. It is likewise possible to dry the fermentation broth directly, i.e. without previous concentration by spray drying or spray granulation.

[0221] “Free-flowing” means powders which, from a series of glass orifice vessels with orifices of different sizes, flow unimpeded at least out of the vessel with a 5 mm orifice (Klein: Seifen, Öle, Fette, Wachse 94, 12 (1968)).

[0222] “Fine” means a powder predominantly (>50%) having a particle size of diameter from 20 to 200 μm.

[0223] “Coarse” means a product predominantly (>50%) of a particle size of diameter from 200 to 2000 μm.

[0224] The particle size determination can be carried out by methods of laser diffraction spectrometry. Corresponding methods are described in the textbook “TeilchengroBenmessung in der Laborpraxis” by R. H. Müller and R. Schuhmann, Wissenschaftliche Verlagsgesellschaft Stuttgart (1996) or in the text book “Introduction to Particle Technology” by M. Rhodes, published by Wiley &Sons (1998).

[0225] The free-flowing, fine powder can in turn be converted by suitable compaction or granulation processes into a coarse, very free-flowing, storable and substantially dust-free product.

[0226] The term “dust-free” means that the product comprises only small proportions (<5%) of particle sizes below 100 μm in diameter.

[0227] “Storable” in the sense of this invention means a product which can be stored for at least one (1) year or longer, preferably at least 1.5 years or longer, particularly preferably two (2) years or longer, in a dry and cool environment without any substantial loss of the respective organic-chemical compound occurring. “Substantial loss” means a loss of >5%.

[0228] It is advantageous to employ during the granulation or compaction the usual organic or inorganic auxiliaries or carriers such as starch, gelatin, cellulose derivatives or similar substances, as normally used in the processing of food products or feeds as binders, gelling agents or thickeners, or further substances such as, for example, silicas, silicates (EP0743016A) and stearates.

[0229] It is further advantageous to treat the surface of the resulting granules with oils or fats as described in WO04/054381. Oils which can be used are mineral oils, vegetable oils or mixtures of vegetable oils. Examples of such oils are soybean oil, olive oil, soybean oil/lecithin mixtures. In the same way, silicone oils, polyethylene glycols or hydroxyethylcellulose are also suitable. Treatment of the surfaces of the granules with said oils achieves an increased abrasion resistance of the product and a reduction in the dust content. The oil content in the product is 0.02 to 2.0% by weight, preferably 0.02 to 1.0% by weight, and very particularly preferably 0.2 to 1.0% by weight, based on the total amount of the feed additive.

[0230] Preferred products have a proportion of ≥97% by weight with a particle size of from 100 to 1800 μm or a proportion of ≥95% by weight with a particle size of diameter 300 to 1800 μm. The proportion of dust, i.e. particles with a particle size<100 μm, is preferably >0 to 1% by weight, particularly preferably not exceeding 0.5% by weight.

[0231] However, alternatively, the product may also be absorbed on an organic or inorganic carrier known and customary in the processing of feeds, such as, for example, silicas, silicates, meals, brans, flours, starches, sugars or others, and/or be mixed and stabilized with customary thickeners or binders. Examples of use and processes therefor are described in the literature (Die Mühle+Mischfuttertechnik 132 (1995) 49, page 817).

[0232] The following examples are provided for purposes of illustration, not limitation.

### EXAMPLES

### Example 1: Application of Candidate Promoters to the L-Lysine Biosynthetic Pathway

[0233] The promoters of the present disclosure are useful for improved processes for the production of biomolecules in host cells. An example of the application and use of the promotor of the present disclosure is directed to the production of the amino acid L-lysine.

[0234] FIG. 1 presents the biosynthetic pathway for the production of L-lysine and includes the genes pck, odx, icd, and hom (e.g., the homoserine/threonine synthase pathway), that divert intermediates from the pathway leading to reductions in overall L-lysine yield. The symbols, gene names, Enzyme Commission number (EC number), and map position in C. glutamicum strain ATCC 13032 are provided in Table 3.

[0235] Recombinant vectors comprising a promoter of SEQ ID NOs: 1 to 8 functionally linked to a target gene as provided in Table 3 are cloned into Corynebacterium cloning vectors using yeast homologous recombination cloning techniques to assemble a vector in which each promoter was flanked by direct repeat regions to provide for homologous recombination in Corynebacterium glutamicum at the target gene locus. Upon recombination, the endogenous promoter is replaced by the promoter of SEQ ID NOs: 1 to 8 functionally linked to the respective target gene in the endogenous C. glutamicum locus. A variety of targeting vectors comprising the promoter and functionally linked target gene included a range of homology direct repeat arm lengths ranging from 0.5 Kb, 1 Kb, 2 Kb, and 5 Kb. Each DNA insert was produced by PCR amplification of homologous regions using commercially sourced oligos and the host strain genomic DNA described above as template. The promoter to be introduced into the genome was encoded in the oligo tails. PCR fragments were assembled into the vector backbone using homologous recombination in yeast.

[0236] Vectors are initially transformed into E. coli using standard heat shock transformation techniques and correctly assembled clones are identified and validated. Transformed E. coli bacteria are tested for assembly success. Four colonies from each E. coli transformation plate are cultured and tested for correct assembly via PCR. Vectors are amplified in the E. coli hosts to provide vector DNA for Corynebacterium transformation.

[0237] Validated clones are transformed into Corynebacterium glutamicum host cells via electroporation. For each transformation, the number of Colony Forming Units (CFUs) per μg of DNA is determined as a function of the insert size. Corynebacterium genome integration is analyzed as a function of homology arm length. Shorter arms had a lower efficiency.

[0238] Cultures of Corynebacterium identified as having successful integrations of the insert cassette are cultured on media containing 5% sucrose to counter select for loop outs of the sacb selection gene. Sucrose resistance frequency for various homology direct repeat arms do not vary significantly with arm length. These results suggest that loopout efficiencies remain steady across homology arm lengths of 0.5 kb to 5 kb.

[0239] In order to further validate loop out events, colonies exhibiting sucrose resistance are cultured and analyzed via sequencing. The results for the sequencing of the insert genomic regions are summarized below in Table 6.

TABLE 6
Loop-out Validation Frequency

| Outcome | Frequency (sampling error 95% confidence) | |
|---|---|---|
| Successful | 13% | (9%/20%) |
| Loop out | | |
| Loop Still | 42% | (34%/50%) |
| present | | |
| Mixed read | 44% | (36%/52%) |

[0240] Sequencing results show a 10-20% efficiency in loop outs. Not to be limited by any particular theory, loop-out may be dependent on insert sequence. Even if correct, picking 10-20 sucrose-resistant colonies leads to high success rates.

[0241] Upon integration, the recombinant vectors replace the endogenous promoter sequences with a promoter selected from the group consisting of Pcg1860 (SEQ ID NO:2), Pcg0007 (SEQ ID NO:3), Pcg0755 (SEQ ID NO:4), Pcg0007_lib_265 (SEQ ID NO:5), Pcg3381 (SEQ ID NO:6), Pcg007_lib_119 (SEQ ID NO:7), and Pcg3121 (SEQ ID NO:8). The resulting recombinant strains is provided in the following list:

Pcg1860-asd; Pcg0755-asd; Pcg0007_119-asd; Pcg3121-asd; Pcg0007_265-asd; Pcg3381-asd; Pcg1860-ask; Pcg0755-ask; Pcg3121-ask; Pcg0007_119-ask; Pcg0007_265-ask; Pcg3381-ask; Pcg3381-aspB; Pcg0007_119-aspB; Pcg0007_119-cg0931; Pcg1860-cg0931; Pcg0007_265-cg0931; Pcg0007_39-cg0931; Pcg0755-cg0931; Pcg0007-cg0931; Pcg0007-dapA; Pcg3381-dapA; Pcg0007_265-dapA; Pcg0007_119-dapA; Pcg0007_265-dapB; Pcg0755-dapB; Pcg0007-dapB; Pcg3381-dapB; Pcg1860-dapB Pcg3121-dapB; Pcg0007_119-dapB; Pcg0007_265-dapD; Pcg0007_119-dapD; Pcg3381-dapD; Pcg0007_39-dapD; Pcg3121-dapD; Pcg0007-dapD; Pcg1860-dapD; Pcg0755-dapD; Pcg3381-dapE; Pcg3121-dapE; Pcg0755-dapE; Pcg0007_119-dapE; Pcg1860-dapE; Pcg0007_39-dapE; Pcg0007_265-dapF; Pcg3381-dapF; Pcg0007_119-dapF; Pcg0007-dapF; Pcg1860-dapF; Pcg0007_39-dapF; Pcg3381-ddh; Pcg3121-ddh; Pcg0007_119-ddh; Pcg0007_39-ddh; Pcg1860-ddh; Pcg0007_265-ddh; Pcg0755-ddh; Pcg0007-ddh; Pcg3381-fbp; Pcg0007_119-fbp; Pcg1860-fbp; Pcg0007-fbp; Pcg3121-fbp; Pcg0755-fbp; Pcg0755-hom; Pcg3381-hom; Pcg1860-hom; Pcg3121-hom; Pcg0007_119-icd; Pcg3121-icd; Pcg3381-icd; Pcg1860-icd; Pcg0007_39-icd; Pcg0007-icd; Pcg0007_265-icd; Pcg0007-lysA; Pcg0007_39-lysA; Pcg3121-lysA; Pcg0007_265-lysA; Pcg0007_119-lysA; Pcg3381-lysA; Pcg0007_39-lysE; Pcg0007-lysE; Pcg0007_265-lysE; Pcg3121-lysE; Pcg3381-lysE; Pcg0007_119-lysE; Pcg3381-odx; Pcg0007_265-odx; Pcg0755-odx; Pcg0007-odx; Pcg1860-odx; Pcg0007_39-odx; Pcg0007_119-odx; Pcg3121-odx; Pcg3121-pck; Pcg3381-pck; Pcg0007_119-pck; Pcg0007_265-pck; Pcg0755-pck; Pcg0007_39-pck; Pcg0007-pck; Pcg1860-pck; Pcg3121-pgi; Pcg0007_119-pgi; Pcg3381-pgi; Pcg0007_265-pgi; Pcg1860-pgi; Pcg0007-pgi; Pcg0007_39-ppc; Pcg0007_265-ppc; Pcg0755-ppc; Pcg3381-ppc; Pcg0007_119-ppc; Pcg1860-ppc; Pcg3121-ppc; Pcg0755-ptsG; Pcg1860-ptsG; Pcg0007_39-ptsG; Pcg3381-ptsG; Pcg0007_119-ptsG; Pcg3121-ptsG; Pcg1860-pyc; Pcg0755-pyc; Pcg0007_39-pyc; Pcg0007_265-pyc; Pcg0007-pyc; Pcg3381-pyc; Pcg0007_119-pyc; Pcg3121-pyc; Pcg3121-tkt; Pcg0007_119-tkt; Pcg0755-tkt; Pcg0007-tkt; Pcg3381-tkt; Pcg0007_265-tkt; Pcg0007-zwf; Pcg0755-zwf; Pcg0007_265-zwf; and Pcg1860-zwf; Pcg3121-zwf.

[0242] Multiple single colonies are picked, inoculated and grown as a small scale culture. Each newly created strain comprising a test promoter is tested for lysine yield in small scale cultures designed to assess product titer performance. Small scale cultures are conducted using media from industrial scale cultures. Product titer is optically measured at carbon exhaustion (i.e., representative of single batch yield) with a standard colorimetric assay. Briefly, a concentrated assay mixture is prepared and is added to fermentation samples such that final concentrations of reagents are 160 mM sodium phosphate buffer, 0.2 mM Amplex Red, 0.2 U/mL Horseradish Peroxidase and 0.005 U/mL of lysine oxidase. Reactions proceed to completion and optical density is measured using a Tecan M1000 plate spectrophotometer at a 560 nm wavelength.

[0243] In some cases, the yield of L-lysine is increased by over 24% (e.g., recombinant strain 7000007840) over the non-engineered strain. In other embodiments, the yield of L-lysine is decreased by nearly 90% (e.g., recombinant strain 700000773). Replacement of the promoter for the pgi and zwf results in greater than 10% improvements to L-lysine production.

[0244] Notably, the production of L-lysine is not a simple dependence on incorporating the most active promoters. Lysine yield is maximized by a relatively weak promoter (e.g., pgi having relative promoter expression of 1, 7×, or 48×, or dapB at a relative promoter strength of 7×) or maximized by intermediate expression (e.g., lysA at having a relative promoter expression of 454×). In certain cases, expression is maximal when the relative promoter strength is maximized (e.g., ppc). The location of the gene in the genetic pathway does not reliably predict the relative increase or decrease in L-lysine yield or the optimal promoter strength. For example, high level expression of cg0931 results in improved yield while higher levels of dapD result in no improvement or decreased yield.

### Example 2: Engineering the L-Lysine Biosynthetic Pathway

[0245] The yield of L-lysine is modified by swapping pairs of promoters for target genes. The constructs of Example 1 are used to prepare recombinant organsims as follows:

[0246] The combination of Pcg0007-lysA and Pcg3121-pgi provide for the highest yields of L-lysine.

TABLE 7
Paired Promoter Swapping of Target Genes in the L-lysine biosynthetic pathway

| | | | | Mean Yield | |
|---|---|---|---|---|---|
| Strain ID | Number | PRO Swap 1 | PRO Swap 2 | (A₅₆₀) | Std Dev |
| 7000008489 | 4 | Pcg0007-lysA | Pcg3121-pgi | 1.17333 | 0.020121 |
| 7000008530 | 8 | Pcg1860-pyc | Pcg0007-zwf | 1.13144 | 0.030023 |
| 7000008491 | 7 | Pcg0007-lysA | Pcg0007-zwf | 1.09836 | 0.028609 |
| 7000008504 | 8 | Pcg3121-pck | Pcg0007-zwf | 1.09832 | 0.021939 |
| 7000008517 | 8 | Pcg0007_39-ppc | Pcg0007-zwf | 1.09502 | 0.030777 |
| 7000008502 | 4 | Pcg3121-pck | Pcg3121-pgi | 1.09366 | 0.075854 |
| 7000008478 | 4 | Pcg3381-ddh | Pcg0007-zwf | 1.08893 | 0.025505 |
| 7000008465 | 4 | Pcg0007_265-dapB | Pcg0007-zwf | 1.08617 | 0.025231 |
| 7000008535 | 8 | Pcg0007-zwf | Pcg3121-pgi | 1.06261 | 0.019757 |
| 7000008476 | 6 | Pcg3381-ddh | Pcg3121-pgi | 1.04808 | 0.084307 |
| 7000008510 | 8 | Pcg3121-pgi | Pcg1860-pyc | 1.04112 | 0.021087 |
| 7000008525 | 8 | Pcg1860-pyc | Pcg0007_265-dapB | 1.0319 | 0.034045 |
| 7000008527 | 8 | Pcg1860-pyc | Pcg0007-lysA | 1.02278 | 0.043549 |
| 7000008452 | 5 | Pcg1860-asd | Pcg0007-zwf | 1.02029 | 0.051663 |
| 7000008463 | 4 | Pcg0007_265-dapB | Pcg3121-pgi | 1.00511 | 0.031604 |
| 7000008524 | 8 | Pcg1860-pyc | Pcg1860-asd | 1.00092 | 0.026355 |
| 7000008458 | 4 | Pcg3381-aspB | Pcg1860-pyc | 1.00043 | 0.020083 |
| 7000008484 | 8 | Pcg3381-fbp | Pcg1860-pyc | 0.99686 | 0.061364 |
| 7000008474 | 8 | Pcg3381-ddh | Pcg3381-fbp | 0.99628 | 0.019733 |
| 7000008522 | 8 | Pcg0755-ptsG | Pcg3121-pgi | 0.99298 | 0.066021 |
| 7000008528 | 8 | Pcg1860-pyc | Pcg3121-pck | 0.99129 | 0.021561 |
| 7000008450 | 4 | Pcg1860-asd | Pcg3121-pgi | 0.98262 | 0.003107 |
| 7000008448 | 8 | Pcg1860-asd | Pcg3381-fbp | 0.97814 | 0.022285 |
| 7000008494 | 8 | Pcg0007_39-lysE | Pcg3381-fbp | 0.97407 | 0.027018 |
| 7000008481 | 8 | Pcg3381-fbp | Pcg0007-lysA | 0.9694 | 0.029315 |
| 7000008497 | 8 | Pcg0007_39-lysE | Pcg1860-pyc | 0.9678 | 0.028569 |
| 7000008507 | 8 | Pcg3121-pgi | Pcg3381-fbp | 0.96358 | 0.035078 |
| 7000008501 | 8 | Pcg3121-pck | Pcg0007-lysA | 0.96144 | 0.018665 |
| 7000008486 | 8 | Pcg0007-lysA | Pcg0007_265-dapB | 0.94523 | 0.017578 |
| 7000008459 | 8 | Pcg0007_265-dapB | Pcg1860-asd | 0.94462 | 0.023847 |
| 7000008506 | 2 | Pcg3121-pgi | Pcg0007_265-dapD | 0.94345 | 0.014014 |
| 7000008487 | 8 | Pcg0007-lysA | Pcg3381-ddh | 0.94249 | 0.009684 |
| 7000008498 | 8 | Pcg3121-pck | Pcg1860-asd | 0.94154 | 0.016802 |
| 7000008485 | 8 | Pcg0007-lysA | Pcg1860-asd | 0.94135 | 0.013578 |
| 7000008499 | 8 | Pcg3121-pck | Pcg0007_265-dapB | 0.93805 | 0.013317 |
| 7000008472 | 8 | Pcg3381-ddh | Pcg1860-asd | 0.93716 | 0.012472 |
| 7000008511 | 8 | Pcg0007_39-ppc | Pcg1860-asd | 0.93673 | 0.015697 |
| 7000008514 | 8 | Pcg0007_39-ppc | Pcg0007-lysA | 0.93668 | 0.027204 |
| 7000008473 | 8 | Pcg3381-ddh | Pcg0007_265-dapB | 0.93582 | 0.030377 |
| 7000008461 | 7 | Pcg0007_265-dapB | Pcg3381-fbp | 0.93498 | 0.037862 |
| 7000008512 | 8 | Pcg0007_39-ppc | Pcg0007_265-dapB | 0.93033 | 0.017521 |
| 7000008456 | 8 | Pcg3381-aspB | Pcg3121-pck | 0.92544 | 0.020075 |
| 7000008460 | 8 | Pcg0007_265-dapB | Pcg0007_265-dapD | 0.91723 | 0.009508 |
| 7000008492 | 8 | Pcg0007_39-lysE | Pcg3381-aspB | 0.91165 | 0.012988 |
| 7000008493 | 8 | Pcg0007_39-lysE | Pcg0007_265-dapD | 0.90609 | 0.031968 |
| 7000008453 | 8 | Pcg3381-aspB | Pcg0007_265-dapB | 0.90338 | 0.013228 |
| 7000008447 | 8 | Pcg1860-asd | Pcg0007_265-dapD | 0.89886 | 0.028896 |
| 7000008455 | 8 | Pcg3381-aspB | Pcg0007-lysA | 0.89531 | 0.027108 |
| 7000008454 | 6 | Pcg3381-aspB | Pcg3381-ddh | 0.87816 | 0.025807 |
| 7000008523 | 8 | Pcg0755-ptsG | Pcg1860-pyc | 0.87693 | 0.030322 |
| 7000008520 | 8 | Pcg0755-ptsG | Pcg3381-fbp | 0.87656 | 0.018452 |
| 7000008533 | 4 | Pcg0007-zwf | Pcg3381-fbp | 0.84584 | 0.017012 |
| 7000008519 | 8 | Pcg0755-ptsG | Pcg0007_265-dapD | 0.84196 | 0.025747 |

### Example 3: Engineering the L-Lysine Biosynthetic Pathway with Promoters Operably Linked to Off-Pathway Genes

[0247] The yield of L-lysine is modified by including a second promoter polynucleotide sequence functionally linked to an off-pathway second heterologous target gene. The heterologous target genes are selected from ncg10009, ncg10019, ncg10054, ncg10082, ncg10142, ncg10223, ncg10241, ncg10242, ncg10304, ncg10306, ncg10356, ncg10398, ncg10408, ncg10424, ncg10425, ncg10427, ncg10439, ncg10458, ncg10471, ncg10531, ncg10546, ncg10564, ncg10573, ncg10578, ncg10581, ncg10598, ncg10600, ncg10601, ncg10641, ncg10663, ncg10668, ncg10737, ncg10767, ncg10813, ncg10823, ncg10827, ncg10853, ncg10874, ncg10877, ncg10905, ncg10916, ncg10966, ncg11065, ncg11124, ncg11137, ncg11152, ncg11187, ncg11196, ncg11202, ncg11203, ncg11208, ncg11261, ncg11262, ncg11267, ncg11301, ncg11320, ncg11322, ncg11364, ncg11366, ncg11371, ncg11372, ncg11457, ncg11484, ncg11500, ncg11503, ncg11508, ncg11511, ncg11545, ncg11550, ncg11583, ncg11607, ncg11855, ncg11858, ncg11880, ncg11886, ncg11900, ncg11905, ncg11911, ncg11928, ncg11948, ncg11961, ncg12001, ncg12002, ncg12019, ncg12048, ncg12077, ncg12104, ncg12147, ncg12153, ncg12190, ncg12204, ncg12210, ncg12211, ncg12247, ncg12250, ncg12274, ncg12286, ncg12287, ncg12298, ncg12327, ncg12399, ncg12425, ncg12440, ncg12441, ncg12446, ncg12449, ncg12472, ncg12473, ncg12481, ncg12491, ncg12505, ncg12527, ncg12535, ncg12538, ncg12559, ncg12567, ncg12569, ncg12576, ncg12587, ncg12614, ncg12669, ncg12684, ncg12699, ncg12702, ncg12755, ncg12789, ncg12790, ncg12802, ncg12827, ncg12886, ncg12898, ncg12901, ncg12905, ncg12921, ncg12929, ncg12930, ncg12931, ncg12982, and ncg12984.

[0248] Constructs containing a promoter identified herein linked to sequences homologous to a portion of the heterologous off-pathway genes identified above are used to prepare recombinant host cell organisms as provided in Tables 8 and 9. Upon integration, the recombinant vectors replace the endogenous promoter sequences with a promoter selected from the group consisting of Pcg1860 (SEQ ID NO:2), Pcg0007 (SEQ ID NO:3), Pcg0755 (SEQ ID NO:4), Pcg0007_lib_265 (SEQ ID NO:5), Pcg3381 (SEQ ID NO:6), Pcg007_lib_119 (SEQ ID NO:7), and Pcg3121 (SEQ ID NO:8). A list of the resulting recombinant strains is provided below in Table 8.

[0249] Multiple single colonies (N in Table 8) are picked, inoculated and grown as a small scale culture. Each newly created strain comprising a test promoter is tested for lysine yield in small scale cultures designed to assess product titer performance. Small scale cultures are conducted using media from industrial scale cultures. Product titer is optically measured at carbon exhaustion (i.e., representative of single batch yield) with a standard colorimetric assay. Briefly, a concentrated assay mixture is prepared and is added to fermentation samples such that final concentrations of reagents are 160 mM sodium phosphate buffer, 0.2 mM Amplex Red, 0.2 U/mL Horseradish Peroxidase and 0.005 U/mL of lysine oxidase. Reactions proceed to completion and optical density is measured using a Tecan M1000 plate spectrophotometer at a 560 nm wavelength.

[0250] As shown in Table 8, the yield of L-lysine is increased by over 14% (e.g., recombinant strain 7000152451) over the parent strain that does not contain a heterologous promoter functionally linked to an off-pathway target gene. Among those promoter replacements applied in at least three different strains in Table 9, the best performing modifications overall are pcg0007_39-cg0725 (average of 6.5% yield change in six strains), pcg0007_39-ncg11262 (average of 6.3% yield change in nine strains), and pcg0007_39-cg2766 (average of 5.1% yield change in 23 strains).

[0251] Notably, the production of L-lysine is not a simple dependence on incorporating the most active promoters. The pcg3121-mutm22522 modification involves a weak promoter but improved yield by an average of 5% in four strains.

TABLE 8
Recombinant strains of C. glutamicum having modified expression of non-L-lysine
Biosynthetic Genes and yield change from base of at least 3%, where the promoter-
target modification has been applied in at least five different strain backgrounds

| | | | | | % Yield |
|---|---|---|---|---|---|
| | | | Mean | | Change |
| Strain | promoter-target | N | (A₅₆₀) | Std Error | From Base |
| 7000011650 | pcg0007_39-dnak | 16 | 0.939907 | 0.005637 | 14.40616 |
| 7000011837 | pcg0007_39-cg0074 | 8 | 0.924085 | 0.005601 | 12.48029 |
| 7000012092 | pcg3121-cg0074 | 8 | 0.927409 | 0.006967 | 12.88495 |
| 7000051494 | pcg1860-rhle_609 | 14 | 1.060682 | 0.005131 | 8.870004 |
| 7000051495 | pcg3121-cg1144 | 16 | 1.055172 | 0.0054 | 8.30446 |
| 7000071062 | pcg1860-rhle_609 | 18 | 0.744484 | 0.007673 | 3.518385 |
| 7000101786 | pcg0007_39-cg2899_2194 | 20 | 1.059718 | 0.00367 | 3.920982 |
| 7000101932 | pcg0007_39-cg1486 | 6 | 1.057967 | 0.008648 | 3.749293 |
| 7000101946 | pcg0007_39-cg2766 | 448 | 1.075533 | 0.003077 | 5.471888 |
| 7000102382 | pcg0007_39-cmk | 8 | 1.056225 | 0.007802 | 3.57847 |
| 7000132573 | pcg0007_39-rpob_383 | 12 | 1.055606 | 0.008687 | 3.517745 |
| 7000132579 | pcg0007_39-ddl | 4 | 1.099107 | 0.012557 | 4.686924 |
| 7000132585 | pcg0007_39-cg0027 | 5 | 1.078981 | 0.007576 | 5.008844 |
| 7000132587 | pcg0007_39-ddl | 5 | 1.061015 | 0.009978 | 3.260317 |
| 7000132589 | pcg0007_39-rpob_383 | 5 | 1.082512 | 0.007857 | 5.352516 |
| 7000132596 | pcg0007_39-rpob_383 | 5 | 1.107812 | 0.007265 | 6.123558 |
| 7000134570 | pcg0007_39-cg0027 | 12 | 1.071955 | 0.010682 | 9.944488 |
| 7000138780 | pcg1860-cg1144 | 16 | 1.068026 | 0.016669 | 3.061599 |
| 7000139655 | pcg0007_39-cg0725 | 28 | 1.06408 | 0.005703 | 5.890614 |
| 7000144050 | pcg0007_39-cg0027 | 8 | 1.113507 | 0.009172 | 5.81486 |
| 7000144052 | pcg0007_39-cg1527 | 6 | 1.122574 | 0.009961 | 6.676453 |
| 7000144055 | pcg0007_39-ddl | 8 | 1.114668 | 0.003544 | 5.925188 |
| 7000144056 | pcg0007_39-rpob_383 | 8 | 1.122532 | 0.004265 | 6.672479 |
| 7000148399 | pcg0007_39-cg0725 | 39 | 1.069788 | 0.007402 | 3.231703 |
| 7000148414 | pcg0007_39-cg0725 | 20 | 1.06931 | 0.008863 | 6.411116 |
| 7000148433 | pcg0007_39-ddl | 4 | 0.999022 | 0.013036 | 3.363822 |
| 7000148440 | pcg0007_39-cg0725 | 17 | 1.080813 | 0.009706 | 11.82635 |
| 7000148442 | pcg0007_39-cg2766 | 15 | 1.09271 | 0.011011 | 13.0573 |
| 7000148453 | pcg0007_39-cg0725 | 19 | 0.967318 | 0.008709 | 3.173838 |
| 7000148476 | pcg0007_39-hspr | 2 | 0.95376 | 0.0072 | 4.883646 |
| 7000148498 | pcg0007_39-cg3352 | 7 | 0.956069 | 0.01208 | 5.137602 |
| 7000148526 | pcg0007_39-cg2899_2194 | 4 | 0.9628 | 0.022005 | 5.877807 |
| 7000148917 | pcg0007_39-cg2766 | 17 | 0.966282 | 0.007737 | 6.260712 |
| 7000148950 | pcg0007_39-cg2766 | 11 | 1.101872 | 0.00755 | 6.318818 |
| 7000148952 | pcg0007_39-cg2965 | 11 | 1.068518 | 0.006968 | 3.100537 |
| 7000148963 | pcg0007_39-rpob_383 | 26 | 0.885703 | 0.01053 | 4.88738 |
| 7000148966 | pcg0007_39-cg2766 | 19 | 1.078181 | 0.00924 | 5.142825 |
| 7000149002 | pcg0007_39-cg2766 | 17 | 1.105547 | 0.003775 | 3.957767 |
| 7000149072 | pcg0007_39-cg2899_2194 | 7 | 0.938323 | 0.009912 | 3.186081 |
| 7000149133 | pcg0007_39-cg0074 | 4 | 0.949821 | 0.002412 | 4.45053 |
| 7000149138 | pcg3121-cg0074 | 6 | 0.93946 | 0.002513 | 3.311153 |
| 7000151562 | pcg0007_39-cg2766 | 22 | 1.069264 | 0.007822 | 4.196667 |
| 7000151586 | pcg3121-cg1144 | 8 | 0.948437 | 0.006684 | 4.298347 |
| 7000151646 | pcg0007_39-cg2766 | 37 | 1.073209 | 0.00667 | 3.660275 |
| 7000151755 | pcg0007_39-cg2766 | 6 | 1.07101 | 0.010452 | 12.61841 |
| 7000151756 | pcg0007_39-cg2899 | 2 | 1.080952 | 0.00245 | 13.66387 |
| 7000151757 | pcg0007_39-rho | 7 | 1.055369 | 0.010359 | 10.97379 |
| 7000151842 | pcg0007_39-cg2766 | 14 | 0.950916 | 0.007382 | 4.092383 |
| 7000151844 | pcg0007_39-cg2766 | 13 | 0.980145 | 0.005638 | 7.291958 |
| 7000151863 | pcg0007_39-cg0725 | 347 | 1.037644 | 0.003105 | 8.621402 |
| 7000151867 | pcg1860-cg1144 | 17 | 0.997554 | 0.016818 | 4.424723 |
| 7000151881 | pcg0007_39-cg2766 | 21 | 1.057606 | 0.003115 | 3.190432 |
| 7000151906 | pcg0007_39-cg2766 | 52 | 1.085568 | 0.008262 | 5.547884 |
| 7000152431 | pcg0007_39-urer | 27 | 1.082933 | 0.008288 | 4.599504 |
| 7000152450 | pcg0007_39-nusg | 27 | 0.990823 | 0.013909 | 5.68089 |
| 7000152451 | pcg3121-mutm2_2522 | 8 | 0.98005 | 0.00757 | 4.531918 |
| 7000152503 | pcg0007_39-ddl | 8 | 0.972555 | 0.00636 | 3.732443 |
| 7000152510 | pcg1860-cg1144 | 6 | 0.973355 | 0.005158 | 3.817762 |
| 7000152585 | pcg0007_39-cg2899 | 6 | 0.92449 | 0.028472 | 6.198442 |
| 7000152586 | pcg0007_39-cg2965 | 15 | 0.952111 | 0.014247 | 9.371358 |
| 7000152587 | pcg0007_39-ddl | 6 | 0.97185 | 0.010086 | 11.63879 |
| 7000152595 | pcg3121-mutm2_2522 | 7 | 1.000598 | 0.005055 | 14.94122 |
| 7000154599 | pcg0007_39-cg2766 | 32 | 1.047813 | 0.006632 | 5.038279 |
| 7000154607 | pcg0007_39-cg2766 | 64 | 1.094538 | 0.01056 | 4.462625 |
| 7000154623 | pcg0007_39-cg2766 | 12 | 1.084043 | 0.010304 | 5.347278 |
| 7000155554 | pcg0007_39-cg2766 | 76 | 1.061757 | 0.006753 | 3.655825 |
| 7000172142 | pcg0007_39-cg2766 | 23 | 0.98211 | 0.006367 | 5.011511 |
| 7000172150 | pcg0007_39-cg2766 | 20 | 1.100986 | 0.007079 | 5.411028 |
| 7000174400 | pcg0007_39-tyra | 42 | 1.082497 | 0.011274 | 3.702717 |
| 7000174421 | pcg0007_39-cg1486 | 34 | 1.087003 | 0.01147 | 4.134408 |
| 7000178668 | pcg0007_39-cg2899 | 18 | 1.091477 | 0.021824 | 3.721322 |
| 7000178693 | pcg0007_39-cg0027 | 18 | 1.091807 | 0.011304 | 3.519654 |
| 7000179790 | pcg0007_39-ncgl1511 | 13 | 1.077263 | 0.020883 | 3.484369 |
| 7000179967 | pcg0007_39-ncgl1262 | 55 | 1.127037 | 0.009118 | 8.2657 |
| 7000182541 | pcg0007_39-cg3419 | 11 | 1.109639 | 0.009557 | 5.221902 |
| 7000182553 | pcg0007_39-cg1486 | 10 | 1.121579 | 0.012964 | 6.354126 |
| 7000182556 | pcg0007_39-cg3210 | 8 | 1.093494 | 0.013361 | 3.690927 |
| 7000182560 | pcg0007_39-cg1486 | 9 | 1.111948 | 0.011145 | 5.440906 |
| 7000182594 | pcg0007_39-cg1486 | 8 | 1.030912 | 0.015987 | 3.199736 |
| 7000182604 | pcg0007_39-cg1486 | 8 | 1.080288 | 0.013249 | 4.919604 |
| 7000182620 | pcg0007_39-cg1486 | 71 | 1.121599 | 0.007064 | 3.116152 |
| 7000183003 | pcg0007_39-ncgl0767 | 8 | 1.1098 | 0.015313 | 5.23717 |
| 7000183123 | pcg0007_39-ncgl2481 | 7 | 1.098826 | 0.017557 | 4.1966 |
| 7000183674 | pcg0007_39-tyra | 11 | 1.065235 | 0.007951 | 3.264175 |
| 7000187919 | pcg0007_39-cg1486 | 8 | 1.055633 | 0.007257 | 3.038697 |
| 7000187929 | pcg0007_39-ncgl1511 | 52 | 1.074922 | 0.006759 | 5.748624 |
| 7000187963 | pcg0007_39-ncgl0827 | 8 | 1.093548 | 0.004974 | 4.32642 |
| 7000190043 | pcg0007_39-tyra | 12 | 1.105391 | 0.006829 | 3.253128 |
| 7000190074 | pcg0007_39-cg1486 | 10 | 1.119157 | 0.007057 | 3.146392 |
| 7000190089 | pcg0007_39-ncgl1262 | 24 | 1.132882 | 0.010445 | 7.067927 |
| 7000190098 | pcg0007_39-cg1486 | 12 | 1.096864 | 0.010931 | 3.142087 |
| 7000190123 | pcg0007_39-ncgl1262 | 144 | 1.11294 | 0.002915 | 5.948846 |
| 7000191520 | pcg0007_39-ncgl1262 | 117 | 1.099061 | 0.004345 | 5.441041 |
| 7000191588 | pcg0007_39-ncgl0767 | 12 | 1.096351 | 0.004382 | 4.369537 |
| 7000196624 | pcg0007_39-ncgl0304 | 18 | 1.090471 | 0.0102 | 3.809772 |
| 7000196641 | pcg0007_39-ncgl1511 | 12 | 1.173593 | 0.084735 | 4.635733 |
| 7000196649 | pcg0007_39-ncgl0767 | 18 | 1.128663 | 0.008043 | 4.022545 |
| 7000196650 | pcg0007_39-ncgl1262 | 19 | 1.127885 | 0.005913 | 3.95088 |
| 7000196651 | pcg0007_39-ncgl1511 | 7 | 1.119959 | 0.018691 | 3.220332 |
| 7000196657 | pcg0007_39-ncgl0767 | 8 | 1.11792 | 0.008145 | 3.032404 |
| 7000196668 | pcg0007_39-ncgl0767 | 18 | 1.114954 | 0.005466 | 3.439875 |
| 7000196677 | pcg0007_39-ncgl1262 | 14 | 1.131585 | 0.004536 | 4.982825 |
| 7000196687 | pcg0007_39-cg1486 | 20 | 1.129246 | 0.004393 | 4.76576 |
| 7000196703 | pcg0007_39-ncgl1262 | 20 | 1.17434 | 0.003597 | 8.949436 |
| 7000197878 | pcg0007_39-ncgl0304 | 16 | 1.106952 | 0.005627 | 3.246974 |
| 7000197883 | pcg0007_39-ncgl1262 | 19 | 1.129494 | 0.00609 | 5.076771 |
| 7000197896 | pcg0007_39-ncgl0767 | 22 | 1.199136 | 0.005992 | 5.506654 |
| 7000197934 | pcg0007_39-ncgl1262 | 20 | 1.112516 | 0.005336 | 7.136187 |

[0252] As shown in Table 9, off-pathway target genes that exhibit a significant increase in lysine production when operably linked to a heterologous promoter exhibit an overrepresentation of certain GOSlim terms.

TABLE 9
Recombinant strains of C. glutamicum having modified expression of non-L-lysine Biosynthetic
Genes and yield change from base of at least 3%, and associated GOSlim terms

| promoter- | | Improvement | |
|---|---|---|---|
| target | N | Over Parent | GOSlims |
| pcg1860-pfka | 1 | 4.39028632 | GO:0051186; GO:0005975; GO:0016301; GO:0043167; GO:0034641; |
| | | | GO:0008150; GO:0044281; GO:0003674; GO:0006091; GO:0009056 |
| pcg0007_265- | 1 | 3.34890197 | GO:0051186; GO:0005975; GO:0016301; GO:0043167; GO:0034641; |
| pfka | | | GO:0008150; GO:0044281; GO:0003674; GO:0006091; GO:0009056 |
| pcg3381-pfka | 1 | 11.3980559 | GO:0051186; GO:0005975; GO:0016301; GO:0043167; GO:0034641; |
| | | | GO:0008150; GO:0044281; GO:0003674; GO:0006091; GO:0009056 |
| pcg0007_39- | 6 | 14.4061592 | GO:0008150; GO:0006457; GO:0003674; GO:0051082; GO:0043167 |
| dnak | | | |
| pcg0007-rho | 1 | 13.4898058 | GO:0009058; GO:0008150; GO:0003723; GO:0016887; GO:0003674; |
| | | | GO:0043167; GO:0034641; GO:0004386 |
| pcg0007- | 1 | 12.5839916 | GO:0006457; GO:0003674; GO:0008150; GO:0043167 |
| groel | | | |
| pcg1860-rho | 3 | 14.1730443 | GO:0009058; GO:0008150; GO:0003723; GO:0016887; GO:0003674; |
| | | | GO:0043167; GO:0034641; GO:0004386 |
| pcg1860- | 2 | 13.5818163 | GO:0004518; GO:0016829; GO:0006950; GO:0016798; GO:0034641; |
| mutm2_2522 | | | GO:0008150; GO:0003677; GO:0006259; GO:0003674; GO:0043167 |
| pcg0007_265- | 1 | 13.2635149 | GO:0043167; GO:0003674; GO:0004386 |
| rhle_609 | | | |
| pcg3381-gpsi | 1 | 13.1192293 | GO:0016779; GO:0004518; GO:0043167; GO:0008150; GO:0034641; |
| | | | GO:0003674; GO:0003723; GO:0034655; GO:0009056 |
| pcg3121-rho | 1 | 12.3280267 | GO:0009058; GO:0008150; GO:0003723; GO:0016887; GO:0003674; |
| | | | GO:0043167; GO:0034641; GO:0004386 |
| pcg0007_39- | 5 | 12.4802928 | GO:0003674 |
| cg0074 | | | |
| pcg0007_39- | 2 | 13.8438588 | GO:0008150; GO:0016779; GO:0003674; GO:0043167 |
| glne | | | |
| pcg0007- | 1 | 12.1722755 | GO:0003674 |
| cg0074 | | | |
| pcg0007-glne | 1 | 14.1530559 | GO:0008150; GO:0016779; GO:0003674; GO:0043167 |
| pcg0007_265- | 1 | 12.5857278 | GO:0003674 |
| cg0074 | | | |
| pcg0007_265- | 1 | 17.1431663 | GO:0008150; GO:0016779; GO:0003674; GO:0043167 |
| glne | | | |
| pcg3381- | 1 | 12.266976 | GO:0003674 |
| cg0074 | | | |
| pcg3121- | 7 | 12.8849506 | GO:0003674 |
| cg0074 | | | |
| pcg3121-glne | 2 | 14.2546395 | GO:0008150; GO:0016779; GO:0003674; GO:0043167 |
| pcg1860- | 7 | 8.87000429 | GO:0043167; GO:0003674; GO:0004386 |
| rhle_609 | | | |
| pcg1860- | 7 | 3.51838501 | GO:0043167; GO:0003674; GO:0004386 |
| rhle_609 | | | |
| pcg0007_39- | 4 | −4.5845813 | GO:0009058; GO:0008150; GO:0044281; GO:0003674; GO:0016301; |
| prsa | | | GO:0034641; GO:0043167 |
| pcg0007_39- | 3 | 3.06020314 | GO:0034641; GO:0008150; GO:0001071; GO:0003677; GO:0003674; |
| cg2942 | | | GO:0009058 |
| pcg0007_39- | 61 | −0.6395119 | GO:0003674; GO:0003677 |
| cg1527 | | | |
| pcg0007_39- | 4 | 0.76168482 | GO:0034641; GO:0003674; GO:0001071; GO:0003677; GO:0008150; |
| cg3239 | | | GO:0009058 |
| pcg1860- | 1 | −0.5888931 | GO:0034641; GO:0003674; GO:0001071; GO:0003677; GO:0008150; |
| cg3239 | | | GO:0009058 |
| pcg0007_39- | 3 | −3.8426999 | GO:0034641; GO:0008150; GO:0044281; GO:0003677; GO:0003674; |
| cg2831_2140 | | | GO:0009058 |
| pcg1860- | 1 | −7.8963623 | GO:0034641; GO:0003674; GO:0003723; GO:0008150; GO:0016829; |
| cg1615 | | | GO:0016853 |
| pcg0007_39- | 4 | −3.1295926 | GO:0044403; GO:0006950; GO:0008150 |
| cg2151_1597 | | | |
| pcg1860- | 1 | −7.3331102 | GO:0044403; GO:0006950; GO:0008150 |
| cg2151_1597 | | | |
| pcg1860- | 1 | −3.2598098 | GO:0034641; GO:0003674; GO:0001071; GO:0003677; GO:0008150; |
| cg2783_2117 | | | GO:0009058 |
| pcg0007_39- | 2 | −6.1189202 | GO:0003674; GO:0001071; GO:0003677; GO:0008150; GO:0043167 |
| cg2784 | | | |
| pcg0007_39- | 1 | −5.1371168 | GO:0009058; GO:0034641; GO:0003674; GO:0003677; GO:0008150; |
| rpob_384 | | | GO:0016779 |
| pcg1860-ptsi | 1 | −12.991654 | GO:0016301; GO:0003674; GO:0008150; GO:0006810; GO:0043167 |
| pcg0007_39- | 3 | −7.9173341 | GO:0009058; GO:0003674; GO:0008150; GO:0016779 |
| galu2 | | | |
| pcg0007_39- | 9 | 3.92098179 | GO:0034641; GO:0003674; GO:0001071; GO:0003677; GO:0008150; |
| cg2899_2194 | | | GO:0009058 |
| pcg0007_39- | 1 | 4.35468317 | GO:0034641; GO:0008150; GO:0003677; GO:0003674; GO:0009058 |
| cg0646_412 | | | |
| pcg1860- | 1 | 3.73948719 | GO:0034641; GO:0008150; GO:0003677; GO:0003674; GO:0009058 |
| cg0646_412 | | | |
| pcg0007_39- | 3 | 3.82606325 | GO:0034641; GO:0008150; GO:0003677; GO:0003674; GO:0009058 |
| cg1410 | | | |
| pcg0007_39- | 32 | 3.74929273 | GO:0034641; GO:0008150; GO:0003677; GO:0003674; GO:0009058 |
| cg1486 | | | |
| pcg0007_39- | 45 | 5.47188771 | GO:0034641; GO:0003674; GO:0001071; GO:0003677; GO:0008150; |
| cg2766 | | | GO:0009058 |
| pcg1860- | 1 | 3.01149306 | GO:0034641; GO:0003674; GO:0001071; GO:0003677; GO:0008150; |
| cg0537 | | | GO:0009058 |
| pcg0007_39- | 3 | 3.09596969 | GO:0034641; GO:0008150; GO:0003677; GO:0003674; GO:0009058 |
| hrca | | | |
| pcg1860- | 1 | 3.74501997 | GO:0034641; GO:0008150; GO:0001071; GO:0003677; GO:0003674; |
| cg2965 | | | GO:0009058 |
| pcg0007_39- | 1 | 3.71827755 | GO:0034641; GO:0003674; GO:0001071; GO:0003677; GO:0008150; |
| cg0702_459 | | | GO:0009058 |
| pcg0007_39- | 2 | 3.55921201 | GO:0034641; GO:0003674; GO:0001071; GO:0003677; GO:0008150; |
| cg0702_460 | | | GO:0009058 |
| pcg0007_39- | 2 | −6.7755339 | GO:0034641; GO:0003674; GO:0001071; GO:0003677; GO:0008150; |
| cg1324_966 | | | GO:0009058 |
| pcg0007_39- | 5 | 3.57846953 | GO:0034641; GO:0003674; GO:0044281; GO:0008150; GO:0016301; |
| cmk | | | GO:0043167 |
| pcg1860-cmk | 1 | 4.52929794 | GO:0034641; GO:0003674; GO:0044281; GO:0008150; GO:0016301; |
| | | | GO:0043167 |
| pcg0007_39- | 52 | −2.3418417 | GO:0009058; GO:0008150; GO:0003723; GO:0016887; GO:0003674; |
| rho | | | GO:0043167; GO:0034641; GO:0004386 |
| pcg0007_39- | 59 | 3.51774505 | GO:0009058; GO:0034641; GO:0003674; GO:0003677; GO:0008150; |
| rpob_383 | | | GO:0016779 |
| pcg0007_39- | 39 | 4.68692368 | GO:0071554; GO:0009058; GO:0003674; GO:0008150; GO:0016874; |
| ddl | | | GO:0043167 |
| pcg0007_39- | 26 | 5.00884445 | GO:0003674; GO:0008150; GO:0003677 |
| cg0027 | | | |
| pcg0007_39- | 39 | 3.26031674 | GO:0071554; GO:0009058; GO:0003674; GO:0008150; GO:0016874; |
| ddl | | | GO:0043167 |
| pcg0007_39- | 59 | 5.35251645 | GO:0009058; GO:0034641; GO:0003674; GO:0003677; GO:0008150; |
| rpob_383 | | | GO:0016779 |
| pcg0007_39- | 59 | 6.12355761 | GO:0009058; GO:0034641; GO:0003674; GO:0003677; GO:0008150; |
| rpob_383 | | | GO:0016779 |
| pcg0007_39- | 26 | 9.94448777 | GO:0003674; GO:0008150; GO:0003677 |
| cg0027 | | | |
| pcg0007_39- | 39 | −2.1858149 | GO:0071554; GO:0009058; GO:0003674; GO:0008150; GO:0016874; |
| ddl | | | GO:0043167 |
| pcg0007_39- | 41 | 5.89061417 | GO:0034641; GO:0003674; GO:0001071; GO:0003677; GO:0008150; |
| cg0725 | | | GO:0009058 |
| pcg0007_39- | 26 | 5.81485995 | GO:0003674; GO:0008150; GO:0003677 |
| cg0027 | | | |
| pcg0007_39- | 61 | 6.67645276 | GO:0003674; GO:0003677 |
| cg1527 | | | |
| pcg0007_39- | 39 | 5.92518842 | GO:0071554; GO:0009058; GO:0003674; GO:0008150; GO:0016874; |
| ddl | | | GO:0043167 |
| pcg0007_39- | 59 | 6.67247895 | GO:0009058; GO:0034641; GO:0003674; GO:0003677; GO:0008150; |
| rpob_383 | | | GO:0016779 |
| pcg0007_39- | 41 | 3.23170311 | GO:0034641; GO:0003674; GO:0001071; GO:0003677; GO:0008150; |
| cg0725 | | | GO:0009058 |
| pcg0007_39- | 41 | 6.41111591 | GO:0034641; GO:0003674; GO:0001071; GO:0003677; GO:0008150; |
| cg0725 | | | GO:0009058 |
| pcg0007_39- | 39 | 3.36382174 | GO:0071554; GO:0009058; GO:0003674; GO:0008150; GO:0016874; |
| ddl | | | GO:0043167 |
| pcg0007_39- | 41 | 11.8263514 | GO:0034641; GO:0003674; GO:0001071; GO:0003677; GO:0008150; |
| cg0725 | | | GO:0009058 |
| pcg0007_39- | 45 | 13.0573003 | GO:0034641; GO:0003674; GO:0001071; GO:0003677; GO:0008150; |
| cg2766 | | | GO:0009058 |
| pcg0007_39- | 41 | 3.17383831 | GO:0034641; GO:0003674; GO:0001071; GO:0003677; GO:0008150; |
| cg0725 | | | GO:0009058 |
| pcg0007_39- | 2 | 3.80588976 | GO:0034641; GO:0003674; GO:0001071; GO:0003677; GO:0008150; |
| cg3315 | | | GO:0009058 |
| pcg0007_39- | 5 | 4.88364585 | GO:0003674; GO:0008150; GO:0003677 |
| hspr | | | |
| pcg0007_39- | 4 | 3.39617637 | GO:0034641; GO:0008150; GO:0003677; GO:0003674; GO:0009058 |
| cg2910 | | | |
| pcg0007_39- | 5 | 5.137602 | GO:0034641; GO:0008150; GO:0003677; GO:0003674; GO:0009058 |
| cg3352 | | | |
| pcg0007_39- | 2 | 5.60015218 | GO:0003674 |
| cg2177_1627 | | | |
| pcg0007_39- | 4 | 4.89731116 | GO:0008150; GO:0016746; GO:0003674 |
| plsc_1822 | | | |
| pcg0007_39- | 9 | 5.87780715 | GO:0034641; GO:0003674; GO:0001071; GO:0003677; GO:0008150; |
| cg2899_2194 | | | GO:0009058 |
| pcg0007_39- | 4 | 2.27062338 | GO:0034641; GO:0008150; GO:0009058 |
| nusg_374 | | | |
| pcg0007_39- | 4 | 4.03184061 | GO:0034641; GO:0008150; GO:0003677; GO:0003674; GO:0009058 |
| cg0646_413 | | | |
| pcg0007_39- | 5 | 2.89398198 | GO:0003674; GO:0008150; GO:0016887 |
| para2_1175 | | | |
| pcg0007_39- | 4 | 3.31061965 | GO:0044403; GO:0006950; GO:0008150 |
| cg2151_1597 | | | |
| pcg0007_39- | 45 | 6.26071191 | GO:0034641; GO:0003674; GO:0001071; GO:0003677; GO:0008150; |
| cg2766 | | | GO:0009058 |
| pcg0007_39- | 45 | 6.31881824 | GO:0034641; GO:0003674; GO:0001071; GO:0003677; GO:0008150; |
| cg2766 | | | GO:0009058 |
| pcg0007_39- | 34 | 3.10053677 | GO:0034641; GO:0008150; GO:0001071; GO:0003677; GO:0003674; |
| cg2965 | | | GO:0009058 |
| pcg0007_39- | 59 | 4.88737996 | GO:0009058; GO:0034641; GO:0003674; GO:0003677; GO:0008150; |
| rpob_383 | | | GO:0016779 |
| pcg0007_39- | 45 | 5.14282462 | GO:0034641; GO:0003674; GO:0001071; GO:0003677; GO:0008150; |
| cg2766 | | | GO:0009058 |
| pcg0007_39- | 45 | 3.95776653 | GO:0034641; GO:0003674; GO:0001071; GO:0003677; GO:0008150; |
| cg2766 | | | GO:0009058 |
| pcg0007_39- | 9 | 3.18608122 | GO:0034641; GO:0003674; GO:0001071; GO:0003677; GO:0008150; |
| cg2899_2194 | | | GO:0009058 |
| pcg0007_39- | 52 | 1.78153221 | GO:0009058; GO:0008150; GO:0003723; GO:0016887; GO:0003674; |
| rho | | | GO:0043167; GO:0034641; GO:0004386 |
| pcg0007_39- | 5 | 4.45053021 | GO:0003674 |
| cg0074 | | | |
| pcg3121- | 7 | 3.31115349 | GO:0003674 |
| cg0074 | | | |
| pcg0007_39- | 4 | −1.0859037 | GO:0004518; GO:0003674 |
| cg2453 | | | |
| pcg3121- | 35 | −0.238969 | GO:0004518; GO:0016829; GO:0006950; GO:0016798; GO:0034641; |
| mutm2_2522 | | | GO:0008150; GO:0003677; GO:0006259; GO:0003674; GO:0043167 |
| pcg0007_39- | 45 | 4.19666701 | GO:0034641; GO:0003674; GO:0001071; GO:0003677; GO:0008150; |
| cg2766 | | | GO:0009058 |
| pcg0007_39- | 45 | 0.57574968 | GO:0034641; GO:0003674; GO:0001071; GO:0003677; GO:0008150; |
| cg2766 | | | GO:0009058 |
| pcg0007_39- | 52 | 0.87040444 | GO:0009058; GO:0008150; GO:0003723; GO:0016887; GO:0003674; |
| rho | | | GO:0043167; GO:0034641; GO:0004386 |
| pcg0007_39- | 45 | 3.66027494 | GO:0034641; GO:0003674; GO:0001071; GO:0003677; GO:0008150; |
| cg2766 | | | GO:0009058 |
| pcg0007_39- | 45 | 12.6184078 | GO:0034641; GO:0003674; GO:0001071; GO:0003677; GO:0008150; |
| cg2766 | | | GO:0009058 |
| pcg0007_39- | 51 | 13.6638701 | GO:0034641; GO:0003674; GO:0001071; GO:0003677; GO:0008150; |
| cg2899 | | | GO:0009058 |
| pcg0007_39- | 52 | 10.9737942 | GO:0009058; GO:0008150; GO:0003723; GO:0016887; GO:0003674; |
| rho | | | GO:0043167; GO:0034641; GO:0004386 |
| pcg0007_39- | 45 | 4.09238291 | GO:0034641; GO:0003674; GO:0001071; GO:0003677; GO:0008150; |
| cg2766 | | | GO:0009058 |
| pcg0007_39- | 45 | 7.29195777 | GO:0034641; GO:0003674; GO:0001071; GO:0003677; GO:0008150; |
| cg2766 | | | GO:0009058 |
| pcg0007_39- | 41 | 8.62140196 | GO:0034641; GO:0003674; GO:0001071; GO:0003677; GO:0008150; |
| cg0725 | | | GO:0009058 |
| pcg0007_39- | 45 | 3.19043193 | GO:0034641; GO:0003674; GO:0001071; GO:0003677; GO:0008150; |
| cg2766 | | | GO:0009058 |
| pcg0007_39- | 45 | 1.62135831 | GO:0034641; GO:0003674; GO:0001071; GO:0003677; GO:0008150; |
| cg2766 | | | GO:0009058 |
| pcg0007_39- | 45 | 5.54788425 | GO:0034641; GO:0003674; GO:0001071; GO:0003677; GO:0008150; |
| cg2766 | | | GO:0009058 |
| pcg0007_39- | 61 | −0.9105898 | GO:0003674; GO:0003677 |
| cg1527 | | | |
| pcg1860-xerd | 32 | −1.0306474 | GO:0034641; GO:0008150; GO:0007049; GO:0003677; GO:0006259; |
| | | | GO:0003674; GO:0007059; GO:0032196; GO:0051301 |
| pcg0007_39- | 44 | 4.59950374 | GO:0034641; GO:0003674; GO:0001071; GO:0003677; GO:0008150; |
| urer | | | GO:0009058 |
| pcg1860-xerd | 32 | 0.51774094 | GO:0034641; GO:0008150; GO:0007049; GO:0003677; GO:0006259; |
| | | | GO:0003674; GO:0007059; GO:0032196; GO:0051301 |
| pcg0007_39- | 52 | 0.80226785 | GO:0034641; GO:0008150; GO:0009058 |
| nusg | | | |
| pcg0007_39- | 52 | 5.6808904 | GO:0034641; GO:0008150; GO:0009058 |
| nusg | | | |
| pcg3121- | 35 | 4.53191788 | GO:0004518; GO:0016829; GO:0006950; GO:0016798; GO:0034641; |
| mutm2_2522 | | | GO:0008150; GO:0003677; GO:0006259; GO:0003674; GO:0043167 |
| pcg1860-xerd | 32 | 0.45401159 | GO:0034641; GO:0008150; GO:0007049; GO:0003677; GO:0006259; |
| | | | GO:0003674; GO:0007059; GO:0032196; GO:0051301 |
| pcg0007_39- | 39 | 3.73244268 | GO:0071554; GO:0009058; GO:0003674; GO:0008150; GO:0016874; |
| ddl | | | GO:0043167 |
| pcg0007_39- | 51 | 6.19844239 | GO:0034641; GO:0003674; GO:0001071; GO:0003677; GO:0008150; |
| cg2899 | | | GO:0009058 |
| pcg0007_39- | 34 | 9.37135808 | GO:0034641; GO:0008150; GO:0001071; GO:0003677; GO:0003674; |
| cg2965 | | | GO:0009058 |
| pcg0007_39- | 39 | 11.6387877 | GO:0071554; GO:0009058; GO:0003674; GO:0008150; GO:0016874; |
| ddl | | | GO:0043167 |
| pcg3121- | 35 | 14.9412244 | GO:0004518; GO:0016829; GO:0006950; GO:0016798; GO:0034641; |
| mutm2_2522 | | | GO:0008150; GO:0003677; GO:0006259; GO:0003674; GO:0043167 |
| pcg0007_39- | 51 | 0.8074962 | GO:0034641; GO:0003674; GO:0001071; GO:0003677; GO:0008150; |
| cg2899 | | | GO:0009058 |
| pcg0007_39- | 34 | −0.9759507 | GO:0034641; GO:0008150; GO:0001071; GO:0003677; GO:0003674; |
| cg2965 | | | GO:0009058 |
| pcg0007_39- | 39 | −0.1918499 | GO:0071554; GO:0009058; GO:0003674; GO:0008150; GO:0016874; |
| ddl | | | GO:0043167 |
| pcg3121- | 35 | 0.62085394 | GO:0004518; GO:0016829; GO:0006950; GO:0016798; GO:0034641; |
| mutm2_2522 | | | GO:0008150; GO:0003677; GO:0006259; GO:0003674; GO:0043167 |
| pcg0007_39- | 45 | 5.03827938 | GO:0034641; GO:0003674; GO:0001071; GO:0003677; GO:0008150; |
| cg2766 | | | GO:0009058 |
| pcg0007_39- | 45 | 4.46262469 | GO:0034641; GO:0003674; GO:0001071; GO:0003677; GO:0008150; |
| cg2766 | | | GO:0009058 |
| pcg0007_39- | 45 | 5.34727763 | GO:0034641; GO:0003674; GO:0001071; GO:0003677; GO:0008150; |
| cg2766 | | | GO:0009058 |
| pcg0007_39- | 51 | 0.8195123 | GO:0034641; GO:0003674; GO:0001071; GO:0003677; GO:0008150; |
| cg2899 | | | GO:0009058 |
| pcg0007_39- | 61 | 0.7420368 | GO:0003674; GO:0003677 |
| cg1527 | | | |
| pcg0007_39- | 34 | −0.9362595 | GO:0034641; GO:0008150; GO:0001071; GO:0003677; GO:0003674; |
| cg2965 | | | GO:0009058 |
| pcg0007_39- | 45 | 3.65582546 | GO:0034641; GO:0003674; GO:0001071; GO:0003677; GO:0008150; |
| cg2766 | | | GO:0009058 |
| pcg3381- | 10 | 0.10953454 | GO:0034641; GO:0008150; GO:0003677; GO:0003674; GO:0009058 |
| cg1410 | | | |
| pcg3121- | 1 | 3.04229587 | GO:0034641; GO:0003674; GO:0001071; GO:0003677; GO:0008150; |
| cg2783_2117 | | | GO:0009058 |
| pcg0007_39- | 45 | 2.64354688 | GO:0034641; GO:0003674; GO:0001071; GO:0003677; GO:0008150; |
| cg2766 | | | GO:0009058 |
| pcg1860-xerd | 32 | −2.7110091 | GO:0034641; GO:0008150; GO:0007049; GO:0003677; GO:0006259; |
| | | | GO:0003674; GO:0007059; GO:0032196; GO:0051301 |
| pcg0007_39- | 59 | −0.290262 | GO:0009058; GO:0034641; GO:0003674; GO:0003677; GO:0008150; |
| rpob_383 | | | GO:0016779 |
| pcg0007_39- | 45 | 5.01151095 | GO:0034641; GO:0003674; GO:0001071; GO:0003677; GO:0008150; |
| cg2766 | | | GO:0009058 |
| pcg0007_39- | 45 | 5.41102769 | GO:0034641; GO:0003674; GO:0001071; GO:0003677; GO:0008150; |
| cg2766 | | | GO:0009058 |
| pcg0007_39- | 3 | 0.45383689 | GO:0034641; GO:0003674; GO:0001071; GO:0008150; GO:0009058 |
| cg3082_2321 | | | |
| pcg0007_39- | 9 | 0.66363765 | GO:0034641; GO:0003674; GO:0001071; GO:0003677; GO:0008150; |
| cg2899_2194 | | | GO:0009058 |
| pcg0007_39- | 23 | 3.70271695 | GO:0009058; GO:0008150; GO:0044281; GO:0003674; GO:0006520; |
| tyra | | | GO:0016491 |
| pcg0007_39- | 32 | 4.13440802 | GO:0034641; GO:0008150; GO:0003677; GO:0003674; GO:0009058 |
| cg1486 | | | |
| pcg0007_39- | 44 | −1.2304485 | GO:0008150; GO:0003674; GO:0003677 |
| cg0800_539 | | | |
| pcg0007_39- | 45 | 2.65554177 | GO:0034641; GO:0003674; GO:0001071; GO:0003677; GO:0008150; |
| cg2766 | | | GO:0009058 |
| pcg0007_39- | 52 | −2.294756 | GO:0009058; GO:0008150; GO:0003723; GO:0016887; GO:0003674; |
| rho | | | GO:0043167; GO:0034641; GO:0004386 |
| pcg0007_39- | 44 | 0.72184473 | GO:0034641; GO:0003674; GO:0001071; GO:0003677; GO:0008150; |
| urer | | | GO:0009058 |
| pcg1860-xerd | 32 | 0.06000601 | GO:0034641; GO:0008150; GO:0007049; GO:0003677; GO:0006259; |
| | | | GO:0003674; GO:0007059; GO:0032196; GO:0051301 |
| pcg0007_39- | 51 | 3.72132191 | GO:0034641; GO:0003674; GO:0001071; GO:0003677; GO:0008150; |
| cg2899 | | | GO:0009058 |
| pcg0007_39- | 26 | 3.51965405 | GO:0003674; GO:0008150; GO:0003677 |
| cg0027 | | | |
| pcg0007_39- | 26 | 1.29180691 | GO:0003674; GO:0008150; GO:0003677 |
| cg0027 | | | |
| pcg0007_39- | 1 | −17.04716 | GO:0005975; GO:0009058; GO:0008150; GO:0016757; GO:0003674 |
| ncgl2535 | | | |
| pcg0007_39- | 1 | 0.34018726 | GO:0051186; GO:0009058; GO:0043167; GO:0034641; GO:0003674; |
| ncgl2446 | | | GO:0044281; GO:0008150; GO:0016874 |
| pcg0007_39- | 1 | −0.3317848 | GO:0008150; GO:0009058; GO:0003674; GO:0006629 |
| ncgl0600 | | | |
| pcg0007_39- | 5 | 0.41840795 | GO:0034641; GO:0008150; GO:0044281; GO:0003674; GO:0016810; |
| ncgl0827 | | | GO:0009058 |
| pcg0007_39- | 17 | 0.56929624 | GO:0016829; GO:0009058; GO:0034641; GO:0008150; GO:0044281; |
| ncgl0306 | | | GO:0004871; GO:0003674; GO:0007165 |
| pcg0007_39- | 11 | −0.388723 | GO:0034641; GO:0003674; GO:0044281; GO:0008150; GO:0016301; |
| ncgl1948 | | | GO:0009058; GO:0043167 |
| pcg0007_39- | 1 | 0.57425156 | GO:0003674; GO:0051186; GO:0009058; GO:0043167; GO:0016765; |
| ncgl1961 | | | GO:0034641; GO:0008150; GO:0044281; GO:0006790 |
| pcg0007_39- | 1 | −2.6435068 | GO:0034641; GO:0008150; GO:0044281; GO:0003674; GO:0016874; |
| ncgl2669 | | | GO:0009058; GO:0043167 |
| pcg0007_39- | 1 | −2.1326692 | GO:0051186; GO:0009058; GO:0034641; GO:0003674; GO:0008150; |
| ncgl1508 | | | GO:0016491 |
| pcg0007_39- | 1 | −1.7218114 | GO:0051186; GO:0009058; GO:0022607; GO:0006790; GO:0008150 |
| ncgl1503 | | | |
| pcg0007_39- | 15 | 3.48436935 | GO:0051186; GO:0009058; GO:0016765; GO:0034641; GO:0008150; |
| ncgl1511 | | | GO:0003674 |
| pcg0007_39- | 2 | −1.3907926 | GO:0016765; GO:0009058; GO:0008150; GO:0006629; GO:0003674; |
| ncgl0598 | | | GO:0044281 |
| pcg0007_39- | 1 | −0.0604086 | GO:0009058; GO:0008150; GO:0006629; GO:0003674; GO:0016829; |
| ncgl2569 | | | GO:0044281; GO:0043167 |
| pcg0007_39- | 1 | 0.97131028 | GO:0034641; GO:0051186; GO:0008150; GO:0003674; GO:0019748; |
| ncgl1905 | | | GO:0009058; GO:0043167 |
| pcg0007_39- | 1 | −0.5809877 | GO:0034641; GO:0003674; GO:0044281; GO:0008150; GO:0016301; |
| ncgl2287 | | | GO:0009058; GO:0043167 |
| pcg0007_39- | 1 | 0.29165558 | GO:0009058; GO:0051186; GO:0006790; GO:0008150; GO:0043167; |
| ncgl1457 | | | GO:0003674; GO:0016874 |
| pcg0007_39- | 1 | −3.5394984 | GO:0043167; GO:0009058; GO:0008150; GO:0006629; GO:0003674; |
| ncgl0874 | | | GO:0016301; GO:0044281 |
| pcg0007_39- | 1 | −1.532018 | GO:0042592; GO:0003674; GO:0008150; GO:0043167; GO:0016491 |
| ncgl1928 | | | |
| pcg0007_39- | 1 | −3.372779 | GO:0006950; GO:0043167; GO:0034641; GO:0003674; GO:0016887; |
| ncgl1880 | | | GO:0003677; GO:0006259; GO:0008150 |
| pcg0007_39- | 2 | −3.3625411 | GO:0003674; GO:0008150; GO:0016491 |
| ncgl0663 | | | |
| pcg0007_39- | 1 | −1.659528 | GO:0004518; GO:0016829; GO:0006950; GO:0016798; GO:0034641; |
| ncgl0813 | | | GO:0008150; GO:0003677; GO:0006259; GO:0003674; GO:0043167 |
| pcg0007_39- | 1 | −2.0046229 | GO:0003674; GO:0008150; GO:0016491 |
| ncgl2286 | | | |
| pcg0007_39- | 2 | −2.6375612 | GO:0004518; GO:0034641; GO:0008150; GO:0006259; GO:0003674; |
| ncgl0641 | | | GO:0006950 |
| pcg0007_39- | 1 | −1.1543868 | GO:0006457; GO:0034641; GO:0051082; GO:0043167; GO:0009058; |
| ncgl2210 | | | GO:0006950; GO:0008150; GO:0006259; GO:0003674 |
| pcg0007_39- | 7 | −1.6400734 | GO:0034641; GO:0008150; GO:0008168; GO:0006259; GO:0003674; |
| ncgl2901 | | | GO:0006950 |
| pcg0007_39- | 7 | −3.1981371 | GO:0003674; GO:0016853; GO:0008150; GO:0016491; GO:0043167 |
| ncgl0877 | | | |
| pcg0007_39- | 1 | −3.302181 | GO:0006950; GO:0003674; GO:0008150; GO:0016491 |
| ncgl2984 | | | |
| pcg0007_39- | 1 | −3.0186755 | GO:0034641; GO:0009058; GO:0006950; GO:0008150; GO:0003677; |
| ncgl1855 | | | GO:0006259; GO:0003674; GO:0008233 |
| pcg0007_39- | 6 | −2.9642887 | GO:0004518; GO:0006950; GO:0043167; GO:0034641; GO:0003674; |
| ncgl1322 | | | GO:0016887; GO:0003677; GO:0006259; GO:0008150 |
| pcg0007_39- | 1 | −1.8831379 | GO:0022607; GO:0006461; GO:0065003; GO:0008150; GO:0003674 |
| ncgl0427 | | | |
| pcg0007_39- | 1 | −2.4009195 | GO:0006950; GO:0034641; GO:0043167; GO:0009058; GO:0008150; |
| ncgl1196 | | | GO:0006259; GO:0003674; GO:0016874 |
| pcg0007_39- | 1 | −2.286499 | GO:0016779; GO:0034641; GO:0043167; GO:0006950; GO:0003674; |
| ncgl2576 | | | GO:0007165; GO:0003677; GO:0006259; GO:0008150 |
| pcg0007_39- | 2 | −0.4397465 | GO:0042592; GO:0003674; GO:0016853; GO:0008150; GO:0016491 |
| ncgl0424 | | | |
| pcg0007_39- | 1 | −0.6772859 | GO:0034641; GO:0008150; GO:0006259; GO:0006950 |
| ncgl2204 | | | |
| pcg0007_39- | 1 | −0.2836098 | GO:0022607; GO:0006461; GO:0065003; GO:0008150 |
| ncgl0425 | | | |
| pcg0007_39- | 1 | −9.9973443 | GO:0006950; GO:0008150 |
| ncgl2755 | | | |
| pcg0007_39- | 1 | −0.9815224 | GO:0006950; GO:0008150; GO:0006259; GO:0003674; GO:0034641; |
| ncgl0142 | | | GO:0016798 |
| pcg0007_39- | 2 | −0.3108331 | GO:0006950; GO:0043167; GO:0034641; GO:0008150; GO:0003677; |
| ncgl0241 | | | GO:0006259; GO:0003674 |
| pcg0007_39- | 1 | −2.484144 | GO:0008150; GO:0003674; GO:0016810; GO:0009056; GO:0043167 |
| ncgl2789 | | | |
| pcg0007_39- | 1 | −2.1347389 | GO:0006520; GO:0034641; GO:0043167; GO:0009058; GO:0008150; |
| ncgl2929 | | | GO:0044281; GO:0016757; GO:0003674 |
| pcg0007_39- | 1 | −2.7583354 | GO:0009058; GO:0008150; GO:0044281; GO:0003674; GO:0016829; |
| ncgl0408 | | | GO:0006520 |
| pcg0007_39- | 7 | −2.8766171 | GO:0006520; GO:0003674; GO:0044281; GO:0008150; GO:0016874 |
| ncgl1484 | | | |
| pcg0007_39- | 2 | −2.1343277 | GO:0003674; GO:0016829; GO:0006520; GO:0009058; GO:0008150; |
| ncgl2473 | | | GO:0044281; GO:0006790 |
| pcg0007_39- | 2 | −2.7490574 | GO:0003674; GO:0016829; GO:0006520; GO:0009058; GO:0008150; |
| ncgl2473 | | | GO:0044281; GO:0006790 |
| pcg0007_39- | 1 | −2.7534611 | GO:0005975; GO:0016301; GO:0043167; GO:0008150; GO:0044281; |
| ncgl2790 | | | GO:0003674; GO:0009056 |
| pcg0007_39- | 1 | −0.9048132 | GO:0006520; GO:0016301; GO:0043167; GO:0009058; GO:0008150; |
| ncgl2274 | | | GO:0044281; GO:0003674; GO:0003723 |
| pcg0007_39- | 1 | −1.1695153 | GO:0009058; GO:0003674; GO:0044281; GO:0008150; GO:0006520; |
| ncgl0398 | | | GO:0016491 |
| pcg0007_39- | 16 | 8.26570011 | GO:0016829; GO:0006520; GO:0043167; GO:0009058; GO:0008150; |
| ncgl1262 | | | GO:0044281; GO:0003674 |
| pcg0007_39- | 1 | 0.01729616 | GO:0034641; GO:0008150; GO:0044281; GO:0003674; GO:0006520; |
| ncgl1550 | | | GO:0009058; GO:0043167 |
| pcg0007_39- | 1 | −0.1957523 | GO:0008150; GO:0003674; GO:0005975 |
| ncgl2505 | | | |
| pcg0007_39- | 1 | 0.0396492 | GO:0008150; GO:0003674; GO:0016301; GO:0005975; GO:0043167 |
| ncgl2399 | | | |
| pcg0007_39- | 1 | 0.92749467 | GO:0008150; GO:0044281; GO:0003674; GO:0016829; GO:0006520; |
| ncgl1500 | | | GO:0006790; GO:0043167 |
| pcg0007_39- | 1 | 0.5029595 | GO:0009058; GO:0016301; GO:0008150; GO:0044281; GO:0003674; |
| ncgl1137 | | | GO:0006520; GO:0043167 |
| pcg0007_39- | 1 | −2.0644554 | GO:0006520; GO:0006790; GO:0043167; GO:0009058; GO:0008150; |
| ncgl2048 | | | GO:0044281; GO:0008168; GO:0003674 |
| pcg0007_39- | 1 | 1.24260236 | GO:0016829; GO:0006520; GO:0034641; GO:0009058; GO:0008150; |
| ncgl2019 | | | GO:0044281; GO:0003674 |
| pcg0007_39- | 1 | −0.3679826 | GO:0008150; GO:0044281; GO:0003674; GO:0009056; GO:0005975; |
| ncgl2559 | | | GO:0016853 |
| pcg0007_39- | 1 | −0.8689167 | GO:0008150; GO:0044281; GO:0003674; GO:0006091; GO:0016746; |
| ncgl2247 | | | GO:0005975; GO:0043167 |
| pcg0007_39- | 1 | −1.5472722 | GO:0016779; GO:0008150; GO:0044281; GO:0003674; GO:0005975; |
| ncgl2002 | | | GO:0043167 |
| pcg0007_39- | 1 | −0.5896195 | GO:0008150; GO:0003674; GO:0016301; GO:0005975 |
| ncgl2905 | | | |
| pcg0007_39- | 1 | −0.8260018 | GO:0003674; GO:0008150; GO:0008233; GO:0016746; GO:0034641; |
| ncgl0916 | | | GO:0009056; GO:0006790 |
| pcg0007_39- | 1 | −1.3961923 | GO:0009058; GO:0008150; GO:0044281; GO:0005975; GO:0016829; |
| ncgl1583 | | | GO:0003674 |
| pcg0007_39- | 1 | −0.6491076 | GO:0008150; GO:0003674; GO:0005975; GO:0016798 |
| ncgl0853 | | | |
| pcg0007_39- | 1 | −0.5659838 | GO:0016853; GO:0016829; GO:0006520; GO:0034641; GO:0009058; |
| ncgl2930 | | | GO:0008150; GO:0044281; GO:0003674 |
| pcg0007_39- | 44 | −0.2183031 | GO:0034641; GO:0003674; GO:0001071; GO:0003677; GO:0008150; |
| urer | | | GO:0009058 |
| pcg0007_39- | 44 | 2.15803348 | GO:0034641; GO:0003674; GO:0001071; GO:0003677; GO:0008150; |
| urer | | | GO:0009058 |
| pcg0007_39- | 51 | −0.3543192 | GO:0034641; GO:0003674; GO:0001071; GO:0003677; GO:0008150; |
| cg2899 | | | GO:0009058 |
| pcg0007_39- | 44 | −3.0417686 | GO:0008150; GO:0003674; GO:0003677 |
| cg0800_539 | | | |
| pcg0007_39- | 9 | 5.22190199 | GO:0061024; GO:0006810; GO:0008150 |
| cg3419 | | | |
| pcg0007_39- | 32 | 6.35412587 | GO:0034641; GO:0008150; GO:0003677; GO:0003674; GO:0009058 |
| cg1486 | | | |
| pcg0007_39- | 25 | 3.69092746 | GO:0008150 |
| cg3210 | | | |
| pcg0007_39- | 32 | 5.44090596 | GO:0034641; GO:0008150; GO:0003677; GO:0003674; GO:0009058 |
| cg1486 | | | |
| pcg0007_39- | 44 | 0.86106557 | GO:0034641; GO:0003674; GO:0001071; GO:0003677; GO:0008150; |
| urer | | | GO:0009058 |
| pcg0007_39- | 32 | 3.19973635 | GO:0034641; GO:0008150; GO:0003677; GO:0003674; GO:0009058 |
| cg1486 | | | |
| pcg0007_39- | 25 | 0.28172305 | GO:0008150 |
| cg3210 | | | |
| pcg0007_39- | 44 | 0.40999284 | GO:0008150; GO:0003674; GO:0003677 |
| cg0800_539 | | | |
| pcg0007_39- | 32 | 4.91960389 | GO:0034641; GO:0008150; GO:0003677; GO:0003674; GO:0009058 |
| cg1486 | | | |
| pcg0007_39- | 44 | −1.8148135 | GO:0008150; GO:0003674; GO:0003677 |
| cg0800_539 | | | |
| pcg0007_39- | 32 | 3.11615157 | GO:0034641; GO:0008150; GO:0003677; GO:0003674; GO:0009058 |
| cg1486 | | | |
| pcg0007_39- | 25 | −0.2470034 | GO:0008150 |
| cg3210 | | | |
| pcg0007_39- | 9 | 5.23717007 | GO:0034641; GO:0003674; GO:0003723; GO:0008150; GO:0008135; |
| ncgl0767 | | | GO:0009058; GO:0006412 |
| pcg0007_39- | 7 | 0.32038287 | GO:0006399; GO:0034641; GO:0008150; GO:0003674; GO:0016301 |
| ncgl0564 | | | |
| pcg0007_39- | 2 | 7.04961811 | GO:0006520; GO:0009058; GO:0043167; GO:0006399; GO:0034641; |
| ncgl1607 | | | GO:0008150; GO:0044281; GO:0003674; GO:0016874; GO:0006412 |
| pcg0007_39- | 7 | 4.19660001 | GO:0043167; GO:0006399; GO:0034641; GO:0008150; GO:0003674; |
| ncgl2481 | | | GO:0016491 |
| pcg0007_39- | 8 | 2.21004426 | GO:0034641; GO:0008150; GO:0051276; GO:0003677; GO:0006259; |
| ncgl0304 | | | GO:0003674; GO:0043167; GO:0016853 |
| pcg0007_39- | 10 | 2.20963174 | GO:0034641; GO:0003674; GO:0003723; GO:0008150; GO:0016829; |
| cg1615 | | | GO:0016853 |
| pcg0007_39- | 6 | −2.1901613 | GO:0008150; GO:0016829; GO:0003674 |
| ncgl2491 | | | |
| pcg0007_39- | 21 | −1.225098 | GO:0071554; GO:0009058; GO:0003674; GO:0051301; GO:0008150; |
| murc | | | GO:0016874; GO:0007049; GO:0043167 |
| pcg0007_39- | 25 | 0.75098055 | GO:0008150 |
| cg3210 | | | |
| pcg0007_39- | 32 | 0.92038074 | GO:0034641; GO:0008150; GO:0003677; GO:0003674; GO:0009058 |
| cg1486 | | | |
| pcg0007_39- | 3 | −1.8936532 | GO:0034641; GO:0003674; GO:0001071; GO:0008150; GO:0009058 |
| cg3082 | | | |
| pcg0007_39- | 8 | 0.57521516 | GO:0003674; GO:0016301; GO:0008150; GO:0003677 |
| cg0012 | | | |
| pcg0007_39- | 44 | −1.4559363 | GO:0034641; GO:0003674; GO:0001071; GO:0003677; GO:0008150; |
| urer | | | GO:0009058 |
| pcg0007_39- | 26 | −1.256254 | GO:0003674; GO:0008150; GO:0003677 |
| cg0027 | | | |
| pcg0007_39- | 59 | 0.7674954 | GO:0009058; GO:0034641; GO:0003674; GO:0003677; GO:0008150; |
| rpob_383 | | | GO:0016779 |
| pcg0007_39- | 51 | 1.89896771 | GO:0034641; GO:0003674; GO:0001071; GO:0003677; GO:0008150; |
| cg2899 | | | GO:0009058 |
| pcg0007_39- | 3 | 1.41331708 | GO:0034641; GO:0003674; GO:0001071; GO:0008150; GO:0009058 |
| cg3082 | | | |
| pcg0007_39- | 23 | 3.26417536 | GO:0009058; GO:0008150; GO:0044281; GO:0003674; GO:0006520; |
| tyra | | | GO:0016491 |
| pcg0007_39- | 21 | −0.5881867 | GO:0071554; GO:0009058; GO:0003674; GO:0051301; GO:0008150; |
| murc | | | GO:0016874; GO:0007049; GO:0043167 |
| pcg0007_39- | 44 | −0.0852691 | GO:0008150; GO:0003674; GO:0003677 |
| cg0800_539 | | | |
| pcg0007_39- | 44 | −0.2629748 | GO:0008150; GO:0003674; GO:0003677 |
| cg0800_539 | | | |
| pcg0007_39- | 1 | 4.77198741 | GO:0016746; GO:0003674 |
| ncgl1208 | | | |
| pcg0007_39- | 1 | 3.0707362 | GO:0003674; GO:0008150; GO:0016491 |
| ncgl2449 | | | |
| pcg0007_39- | 2 | 4.12705375 | GO:0008150; GO:0008233; GO:0003674 |
| ncgl2327 | | | |
| pcg0007_39- | 2 | 4.57292995 | GO:0003674 |
| ncgl2250 | | | |
| pcg0007_39- | 3 | 5.38326154 | GO:0006259; GO:0003674; GO:0034641; GO:0008150; GO:0003677 |
| ncgl1545 | | | |
| pcg0007_39- | 32 | 3.03869679 | GO:0034641; GO:0008150; GO:0003677; GO:0003674; GO:0009058 |
| cg1486 | | | |
| pcg0007_39- | 15 | 5.74862357 | GO:0051186; GO:0009058; GO:0016765; GO:0034641; GO:0008150; |
| ncgl1511 | | | GO:0003674 |
| pcg0007_39- | 5 | 4.32642044 | GO:0034641; GO:0008150; GO:0044281; GO:0003674; GO:0016810; |
| ncgl0827 | | | GO:0009058 |
| pcg0007_39- | 11 | −0.2038558 | GO:0034641; GO:0003674; GO:0044281; GO:0008150; GO:0016301; |
| ncgl1948 | | | GO:0009058; GO:0043167 |
| pcg0007_39- | 44 | −0.7937019 | GO:0008150; GO:0003674; GO:0003677 |
| cg0800_539 | | | |
| pcg0007_39- | 23 | 3.25312756 | GO:0009058; GO:0008150; GO:0044281; GO:0003674; GO:0006520; |
| tyra | | | GO:0016491 |
| pcg0007_39- | 32 | 3.14639212 | GO:0034641; GO:0008150; GO:0003677; GO:0003674; GO:0009058 |
| cg1486 | | | |
| pcg0007_39- | 32 | −3.5839145 | GO:0034641; GO:0008150; GO:0003677; GO:0003674; GO:0009058 |
| cg1486 | | | |
| pcg0007_39- | 32 | −1.8163957 | GO:0034641; GO:0008150; GO:0003677; GO:0003674; GO:0009058 |
| cg1486 | | | |
| pcg0007_39- | 23 | −3.5273781 | GO:0009058; GO:0008150; GO:0044281; GO:0003674; GO:0006520; |
| tyra | | | GO:0016491 |
| pcg0007_39- | 15 | −4.7165343 | GO:0016829; GO:0006520; GO:0034641; GO:0009058; GO:0008150; |
| ncgl2931 | | | GO:0044281; GO:0003674 |
| pcg0007_39- | 16 | 7.06792721 | GO:0016829; GO:0006520; GO:0043167; GO:0009058; GO:0008150; |
| ncgl1262 | | | GO:0044281; GO:0003674 |
| pcg0007_39- | 32 | 3.14208716 | GO:0034641; GO:0008150; GO:0003677; GO:0003674; GO:0009058 |
| cg1486 | | | |
| pcg0007_39- | 16 | 5.94884625 | GO:0016829; GO:0006520; GO:0043167; GO:0009058; GO:0008150; |
| ncgl1262 | | | GO:0044281; GO:0003674 |
| pcg0007_39- | 7 | −1.7262637 | GO:0006520; GO:0003674; GO:0044281; GO:0008150; GO:0016874 |
| ncgl1484 | | | |
| pcg0007_39- | 15 | −1.3365563 | GO:0051186; GO:0009058; GO:0016765; GO:0034641; GO:0008150; |
| ncgl1511 | | | GO:0003674 |
| pcg0007_39- | 16 | 5.44104119 | GO:0016829; GO:0006520; GO:0043167; GO:0009058; GO:0008150; |
| ncgl1262 | | | GO:0044281; GO:0003674 |
| pcg0007_39- | 9 | 4.36953707 | GO:0034641; GO:0003674; GO:0003723; GO:0008150; GO:0008135; |
| ncgl0767 | | | GO:0009058; GO:0006412 |
| pcg0007_39- | 4 | −0.3074247 | GO:0034641; GO:0008150; GO:0003677; GO:0003674; GO:0009058 |
| cg2614_2011 | | | |
| pcg0007_39- | 5 | −3.8871473 | GO:0003674; GO:0008150; GO:0003677 |
| hspr | | | |
| pcg0007_39- | 4 | 1.05794426 | GO:0003674; GO:0003677 |
| cg1392_1013 | | | |
| pcg0007_39- | 32 | 2.84208976 | GO:0034641; GO:0008150; GO:0003677; GO:0003674; GO:0009058 |
| cg1486 | | | |
| pcg0007_39- | 3 | 3.6771318 | GO:0003674; GO:0008150; GO:0003677 |
| cg0979_688 | | | |
| pcg0007_39- | 4 | 1.74233214 | GO:0003674 |
| ptsx′ | | | |
| pcg0007_39- | 1 | −0.6808701 | GO:0006810; GO:0008150; GO:0055085 |
| ncgl0546 | | | |
| pcg0007_39- | 2 | −0.264575 | GO:0009058; GO:0008150; GO:0044281; GO:0003674; GO:0006520; |
| ncgl0242 | | | GO:0034641 |
| pcg0007_39- | 1 | 3.52470923 | GO:0009058; GO:0043167; GO:0034641; GO:0008150; GO:0044281; |
| ncgl0578 | | | GO:0003674; GO:0016491 |
| pcg1860-xerd | 32 | 0.29279276 | GO:0034641; GO:0008150; GO:0007049; GO:0003677; GO:0006259; |
| | | | GO:0003674; GO:0007059; GO:0032196; GO:0051301 |
| pcg0007_39- | 7 | −0.8917066 | GO:0006399; GO:0034641; GO:0008150; GO:0003674; GO:0016301 |
| ncgl0564 | | | |
| pcg0007_39- | 7 | −1.1006911 | GO:0034641; GO:0008150; GO:0008168; GO:0006259; GO:0003674; |
| ncgl2901 | | | GO:0006950 |
| pcg0007_39- | 11 | −0.3328713 | GO:0034641; GO:0003674; GO:0044281; GO:0008150; GO:0016301; |
| ncgl1948 | | | GO:0009058; GO:0043167 |
| pcg0007_39- | 7 | −1.1884484 | GO:0008150; GO:0009058; GO:0003674 |
| ncgl1065 | | | |
| pcg0007_39- | 8 | 3.8097718 | GO:0034641; GO:0008150; GO:0051276; GO:0003677; GO:0006259; |
| ncgl0304 | | | GO:0003674; GO:0043167; GO:0016853 |
| pcg0007_39- | 15 | 4.63573323 | GO:0051186; GO:0009058; GO:0016765; GO:0034641; GO:0008150; |
| ncgl1511 | | | GO:0003674 |
| pcg0007_39- | 9 | 4.02254461 | GO:0034641; GO:0003674; GO:0003723; GO:0008150; GO:0008135; |
| ncgl0767 | | | GO:0009058; GO:0006412 |
| pcg0007_39- | 16 | 3.95087992 | GO:0016829; GO:0006520; GO:0043167; GO:0009058; GO:0008150; |
| ncgl1262 | | | GO:0044281; GO:0003674 |
| pcg0007_39- | 15 | 3.22033208 | GO:0051186; GO:0009058; GO:0016765; GO:0034641; GO:0008150; |
| ncgl1511 | | | GO:0003674 |
| pcg0007_39- | 9 | 3.03240412 | GO:0034641; GO:0003674; GO:0003723; GO:0008150; GO:0008135; |
| ncgl0767 | | | GO:0009058; GO:0006412 |
| pcg0007_39- | 9 | 3.43987546 | GO:0034641; GO:0003674; GO:0003723; GO:0008150; GO:0008135; |
| ncgl0767 | | | GO:0009058; GO:0006412 |
| pcg0007_39- | 25 | −0.2786013 | GO:0008150 |
| cg3210 | | | |
| pcg0007_39- | 16 | 4.9828246 | GO:0016829; GO:0006520; GO:0043167; GO:0009058; GO:0008150; |
| ncgl1262 | | | GO:0044281; GO:0003674 |
| pcg0007_39- | 32 | 4.76576015 | GO:0034641; GO:0008150; GO:0003677; GO:0003674; GO:0009058 |
| cg1486 | | | |
| pcg0007_39- | 16 | 8.94943618 | GO:0016829; GO:0006520; GO:0043167; GO:0009058; GO:0008150; |
| ncgl1262 | | | GO:0044281; GO:0003674 |
| pcg0007_39- | 8 | 3.24697423 | GO:0034641; GO:0008150; GO:0051276; GO:0003677; GO:0006259; |
| ncgl0304 | | | GO:0003674; GO:0043167; GO:0016853 |
| pcg0007_39- | 16 | 5.07677112 | GO:0016829; GO:0006520; GO:0043167; GO:0009058; GO:0008150; |
| ncgl1262 | | | GO:0044281; GO:0003674 |
| pcg0007_39- | 25 | 0.46752889 | GO:0008150 |
| cg3210 | | | |
| pcg0007_39- | 7 | 0.00474009 | GO:0008150; GO:0009058; GO:0003674 |
| ncgl1065 | | | |
| pcg0007_39- | 7 | −1.1311402 | GO:0006520; GO:0003674; GO:0044281; GO:0008150; GO:0016874 |
| ncgl1484 | | | |
| pcg0007_39- | 9 | 5.50665417 | GO:0034641; GO:0003674; GO:0003723; GO:0008150; GO:0008135; |
| ncgl0767 | | | GO:0009058; GO:0006412 |
| pcg0007_39- | 16 | 7.1361868 | GO:0016829; GO:0006520; GO:0043167; GO:0009058; GO:0008150; |
| ncgl1262 | | | GO:0044281; GO:0003674 |
| pcg0007_39- | 11 | 2.17493085 | GO:0034641; GO:0003674; GO:0044281; GO:0008150; GO:0016301; |
| ncgl1948 | | | GO:0009058; GO:0043167 |
| pcg0007_39- | 2 | 3.0247232 | GO:0008150; GO:0008233; GO:0003674 |
| ncgl2327 | | | |
| pcg0007_39- | 3 | 5.33577683 | GO:0006259; GO:0003674; GO:0034641; GO:0008150; GO:0003677 |
| ncgl1545 | | | |

### Example 4: Assessing L-Lysine Biosynthesis Modulation by Genes Belonging to Different Shells

[0253] Genetic loci across the C. glutamicum genome were tested for potential impact on lysine production by generating strains in which the native promoter regulating the gene's expression was substituted with a promoter selected from SEQ ID NOs: 1-8. The impact of each locus was tested by individually substituting the native promoter with one or more promoters from the promoters defined by SEQ ID NOs: 1-8.

[0254] The strains were tested for lysine production in multiple experiments and the mean performance of each strain across all experiments was calculated and compared to a control strain lacking the promoter modification. All strain pairs which differ by a single genetic change were calculated and the difference in lysine production at 96 hours between the strain with the change and the strain without the change was calculated. A change is defined as a hit if this performance difference is significantly greater than 0 (at p=0.01) across all strain pairs that differ by this change.

[0255] Table 10 provides each genetic locus/promoter modification combination tested and the performance thereof. Each genetic locus is provided with a shell designation as defined herein. Table 10 provides the locus id of each modified genetic locus, the promoter used to modify expression, whether any strains containing the modification had a significant difference in strain performance, and the shell allocation of the gene associated with the particular locus. As shown in Table 10, by testing the same genetic locus using multiple different promoters, applicants were able to identify loci encoding genes impacting strain performance, including shell 4 genes for which no known relationship with strain performance for lysine production was previously identified (e.g., see rows 49-54).

TABLE 10
Systematic sampling of promoter/target gene combinations from
different target gene shells for biomolecule production

| locus_id | promoter | any_above_threshold | Shell |
|---|---|---|---|
| ncgl0009 | pcg0007_39 | TRUE | 3 |
| ncgl0009 | pcg3121 | FALSE | 3 |
| ncgl0015 | pcg0007_39 | TRUE | 3 |
| ncgl0015 | pcg3381 | FALSE | 3 |
| ncgl0019 | pcg0007_39 | TRUE | 3 |
| ncgl0019 | pcg0755 | FALSE | 3 |
| ncgl0019 | pcg3121 | FALSE | 3 |
| ncgl0019 | pcg3381 | FALSE | 3 |
| ncgl0026 | pcg0007_39 | TRUE | 3 |
| ncgl0031 | pcg0007_39 | FALSE | 3 |
| ncgl0031 | pcg1860 | TRUE | 3 |
| ncgl0031 | pcg3381 | FALSE | 3 |
| ncgl0042 | pcg0007_39 | TRUE | 3 |
| ncgl0042 | pcg1860 | TRUE | 3 |
| ncgl0054 | pcg0007_39 | TRUE | 4 |
| ncgl0054 | pcg3121 | FALSE | 4 |
| ncgl0082 | pcg0007_119 | FALSE | 3 |
| ncgl0082 | pcg0007_39 | TRUE | 3 |
| ncgl0082 | pcg1860 | TRUE | 3 |
| ncgl0082 | pcg3121 | FALSE | 3 |
| ncgl0082 | pcg3381 | FALSE | 3 |
| ncgl0082 | wt | FALSE | 3 |
| ncgl0111 | pcg0007_39 | TRUE | 4 |
| ncgl0167 | pcg0007_39 | TRUE | 3 |
| ncgl0167 | pcg1860 | TRUE | 3 |
| ncgl0167 | pcg3121 | FALSE | 3 |
| ncgl0182 | pcg0007_39 | FALSE | 2 |
| ncgl0182 | pcg1860 | FALSE | 2 |
| ncgl0182 | pcg3121 | TRUE | 2 |
| ncgl0211 | pcg0007_39 | TRUE | 2 |
| ncgl0211 | pcg0007_39 | TRUE | 3 |
| ncgl0211 | pcg3121 | FALSE | 2 |
| ncgl0211 | pcg3121 | FALSE | 3 |
| ncgl0211 | pcg3381 | FALSE | 2 |
| ncgl0211 | pcg3381 | FALSE | 3 |
| ncgl0223 | pcg0007_39 | TRUE | 3 |
| ncgl0223 | pcg0755 | FALSE | 3 |
| ncgl0223 | pcg2613 | FALSE | 3 |
| ncgl0223 | pcg3381 | FALSE | 3 |
| ncgl0253 | pcg0007_39 | TRUE | 3 |
| ncgl0253 | pcg1860 | TRUE | 3 |
| ncgl0253 | pcg3121 | FALSE | 3 |
| ncgl0253 | pcg3381 | FALSE | 3 |
| ncgl0254 | pcg0007_39 | TRUE | 3 |
| ncgl0280 | pcg1860 | TRUE | 3 |
| ncgl0281 | pcg0007_39 | TRUE | 3 |
| ncgl0281 | pcg3381 | FALSE | 3 |
| ncgl0304 | pcg0007_119 | FALSE | 4 |
| ncgl0304 | pcg0007_39 | TRUE | 4 |
| ncgl0304 | pcg0755 | FALSE | 4 |
| ncgl0304 | pcg1860 | FALSE | 4 |
| ncgl0304 | pcg2613 | FALSE | 4 |
| ncgl0304 | wt | FALSE | 4 |
| ncgl0306 | pcg0007_39 | TRUE | 4 |
| ncgl0306 | pcg0755 | FALSE | 4 |
| ncgl0306 | pcg2613 | FALSE | 4 |
| ncgl0306 | pcg3381 | FALSE | 4 |
| ncgl0355 | pcg0007_39 | TRUE | 2 |
| ncgl0355 | pcg0755 | FALSE | 2 |
| ncgl0355 | pcg1860 | FALSE | 2 |
| ncgl0355 | pcg2613 | FALSE | 2 |
| ncgl0355 | pcg3121 | FALSE | 2 |
| ncgl0355 | pcg3381 | FALSE | 2 |
| ncgl0355 | wt | FALSE | 2 |
| ncgl0359 | pcg0007_39 | FALSE | 2 |
| ncgl0359 | pcg1860 | TRUE | 2 |
| ncgl0378 | pcg0007_39 | TRUE | 3 |
| ncgl0378 | pcg3121 | FALSE | 3 |
| ncgl0378 | pcg3381 | FALSE | 3 |
| ncgl0380 | pcg0007_39 | TRUE | 3 |
| ncgl0386 | pcg0007_39 | TRUE | 3 |
| ncgl0386 | pcg1860 | TRUE | 3 |
| ncgl0411 | pcg0007_39 | TRUE | 3 |
| ncgl0411 | pcg1860 | TRUE | 3 |
| ncgl0411 | pcg3121 | FALSE | 3 |
| ncgl0419 | pcg0007_39 | TRUE | 3 |
| ncgl0419 | pcg1860 | TRUE | 3 |
| ncgl0419 | pcg3381 | FALSE | 3 |
| ncgl0439 | pcg0007_39 | FALSE | 3 |
| ncgl0439 | pcg1860 | TRUE | 3 |
| ncgl0439 | pcg3121 | FALSE | 3 |
| ncgl0439 | pcg3381 | FALSE | 3 |
| ncgl0445 | pcg0007_39 | TRUE | 3 |
| ncgl0445 | pcg3381 | FALSE | 3 |
| ncgl0453 | pcg0007_39 | TRUE | 3 |
| ncgl0453 | pcg3121 | FALSE | 3 |
| ncgl0453 | pcg3381 | FALSE | 3 |
| ncgl0456 | pcg3381 | TRUE | 4 |
| ncgl0458 | pcg0007_39 | TRUE | 3 |
| ncgl0458 | pcg0007_39 | TRUE | 3 |
| ncgl0458 | pcg0007_39 | FALSE | 3 |
| ncgl0458 | pcg3381 | FALSE | 3 |
| ncgl0458 | pcg3381 | FALSE | 3 |
| ncgl0465 | pcg0007_39 | TRUE | 3 |
| ncgl0465 | pcg3381 | FALSE | 3 |
| ncgl0471 | pcg0007_39 | FALSE | 3 |
| ncgl0471 | pcg0007_39 | TRUE | 3 |
| ncgl0471 | pcg0007_39 | FALSE | 3 |
| ncgl0471 | pcg1860 | FALSE | 3 |
| ncgl0471 | pcg1860 | FALSE | 3 |
| ncgl0471 | pcg1860 | FALSE | 3 |
| ncgl0471 | wt | FALSE | 3 |
| ncgl0472 | pcg0007_39 | TRUE | 3 |
| ncgl0482 | pcg0007_39 | TRUE | 3 |
| ncgl0482 | pcg3381 | FALSE | 3 |
| ncgl0509 | pcg0007_39 | TRUE | 3 |
| ncgl0509 | pcg1860 | TRUE | 3 |
| ncgl0509 | pcg3121 | FALSE | 3 |
| ncgl0509 | pcg3381 | FALSE | 3 |
| ncgl0527 | pcg0007_39 | TRUE | 3 |
| ncgl0527 | pcg1860 | TRUE | 3 |
| ncgl0527 | pcg3121 | FALSE | 3 |
| ncgl0527 | pcg3381 | FALSE | 3 |
| ncgl0531 | pcg0007_39 | TRUE | 3 |
| ncgl0531 | pcg0007_39 | TRUE | 3 |
| ncgl0531 | pcg1860 | TRUE | 3 |
| ncgl0531 | pcg3121 | FALSE | 3 |
| ncgl0531 | pcg3381 | FALSE | 3 |
| ncgl0531 | pcg3381 | FALSE | 3 |
| ncgl0546 | pcg0007_39 | TRUE | 4 |
| ncgl0548 | pcg0007_39 | TRUE | 3 |
| ncgl0548 | pcg1860 | TRUE | 3 |
| ncgl0548 | pcg3121 | FALSE | 3 |
| ncgl0548 | pcg3381 | FALSE | 3 |
| ncgl0565 | pcg0007_39 | FALSE | 3 |
| ncgl0565 | pcg1860 | TRUE | 3 |
| ncgl0565 | pcg3121 | FALSE | 3 |
| ncgl0565 | pcg3381 | FALSE | 3 |
| ncgl0578 | pcg0007_39 | TRUE | 4 |
| ncgl0578 | pcg3381 | FALSE | 4 |
| ncgl0581 | pcg0007_39 | TRUE | 3 |
| ncgl0581 | pcg0007_39 | TRUE | 3 |
| ncgl0581 | pcg3121 | FALSE | 3 |
| ncgl0581 | pcg3121 | FALSE | 3 |
| ncgl0581 | pcg3381 | FALSE | 3 |
| ncgl0581 | pcg3381 | FALSE | 3 |
| ncgl0598 | pcg0007_39 | TRUE | 4 |
| ncgl0598 | pcg3381 | FALSE | 4 |
| ncgl0601 | pcg0007_119 | FALSE | 3 |
| ncgl0601 | pcg0007_39 | TRUE | 3 |
| ncgl0601 | pcg3121 | FALSE | 3 |
| ncgl0601 | pcg3381 | FALSE | 3 |
| ncgl0601 | wt | FALSE | 3 |
| ncgl0631 | pcg0007_39 | TRUE | 2 |
| ncgl0631 | pcg1860 | FALSE | 2 |
| ncgl0631 | pcg3121 | FALSE | 2 |
| ncgl0634 | pcg0007 | TRUE | 1 |
| ncgl0634 | pcg0007 | TRUE | 2 |
| ncgl0634 | pcg0007_265 | FALSE | 1 |
| ncgl0634 | pcg0007_265 | FALSE | 2 |
| ncgl0634 | pcg0007_39 | FALSE | 1 |
| ncgl0634 | pcg0007_39 | FALSE | 2 |
| ncgl0634 | pcg0755 | FALSE | 1 |
| ncgl0634 | pcg0755 | FALSE | 2 |
| ncgl0634 | pcg1860 | TRUE | 1 |
| ncgl0634 | pcg1860 | TRUE | 2 |
| ncgl0634 | pcg3121 | FALSE | 1 |
| ncgl0634 | pcg3121 | FALSE | 2 |
| ncgl0634 | pcg3381 | FALSE | 1 |
| ncgl0634 | pcg3381 | FALSE | 2 |
| ncgl0634 | wt | FALSE | 1 |
| ncgl0634 | wt | FALSE | 2 |
| ncgl0634 | wt | FALSE | 1 |
| ncgl0634 | wt | FALSE | 2 |
| ncgl0634 | wt | FALSE | 1 |
| ncgl0634 | wt | FALSE | 2 |
| ncgl0634 | wt | FALSE | 1 |
| ncgl0634 | wt | FALSE | 2 |
| ncgl0634 | wt | FALSE | 1 |
| ncgl0634 | wt | FALSE | 2 |
| ncgl0636 | pcg0007_39 | TRUE | 3 |
| ncgl0636 | pcg3121 | FALSE | 3 |
| ncgl0636 | pcg3381 | FALSE | 3 |
| ncgl0637 | pcg0007_39 | TRUE | 3 |
| ncgl0637 | pcg1860 | TRUE | 3 |
| ncgl0637 | pcg3121 | FALSE | 3 |
| ncgl0637 | pcg3381 | FALSE | 3 |
| ncgl0638 | pcg0007_39 | TRUE | 3 |
| ncgl0638 | pcg0755 | FALSE | 3 |
| ncgl0640 | pcg1860 | TRUE | 3 |
| ncgl0640 | pcg3121 | FALSE | 3 |
| ncgl0640 | pcg3381 | FALSE | 3 |
| ncgl0645 | pcg0007_39 | TRUE | 3 |
| ncgl0645 | pcg3121 | FALSE | 3 |
| ncgl0645 | pcg3381 | FALSE | 3 |
| ncgl0646 | pcg0007_39 | TRUE | 3 |
| ncgl0646 | pcg3121 | FALSE | 3 |
| ncgl0646 | pcg3381 | FALSE | 3 |
| ncgl0655 | pcg0007_39 | TRUE | 3 |
| ncgl0655 | pcg1860 | TRUE | 3 |
| ncgl0655 | pcg1860 | TRUE | 3 |
| ncgl0655 | pcg3121 | FALSE | 3 |
| ncgl0655 | pcg3121 | FALSE | 3 |
| ncgl0655 | pcg3381 | FALSE | 3 |
| ncgl0655 | pcg3381 | FALSE | 3 |
| ncgl0668 | pcg0007_39 | TRUE | 3 |
| ncgl0668 | pcg0755 | FALSE | 3 |
| ncgl0668 | pcg2613 | FALSE | 3 |
| ncgl0668 | pcg3121 | FALSE | 3 |
| ncgl0668 | pcg3381 | FALSE | 3 |
| ncgl0679 | pcg0007_39 | TRUE | 3 |
| ncgl0679 | pcg1860 | FALSE | 3 |
| ncgl0679 | pcg3121 | FALSE | 3 |
| ncgl0679 | pcg3381 | FALSE | 3 |
| ncgl0689 | pcg0007_39 | FALSE | 3 |
| ncgl0689 | pcg0007_39 | TRUE | 3 |
| ncgl0689 | pcg3381 | FALSE | 3 |
| ncgl0694 | pcg0007_39 | FALSE | 3 |
| ncgl0694 | pcg1860 | TRUE | 3 |
| ncgl0694 | pcg3121 | FALSE | 3 |
| ncgl0694 | pcg3381 | FALSE | 3 |
| ncgl0697 | pcg0007_39 | FALSE | 3 |
| ncgl0697 | pcg0007_39 | TRUE | 3 |
| ncgl0697 | pcg3121 | FALSE | 3 |
| ncgl0697 | pcg3381 | FALSE | 3 |
| ncgl0698 | pcg0007_119 | FALSE | 3 |
| ncgl0698 | pcg0007_39 | TRUE | 3 |
| ncgl0698 | pcg0007_39 | TRUE | 3 |
| ncgl0698 | pcg1860 | FALSE | 3 |
| ncgl0698 | pcg3121 | FALSE | 3 |
| ncgl0698 | pcg3121 | FALSE | 3 |
| ncgl0708 | pcg0007_39 | TRUE | 3 |
| ncgl0743 | pcg0007_39 | FALSE | 4 |
| ncgl0743 | pcg3381 | TRUE | 4 |
| ncgl0767 | pcg0007_39 | TRUE | 4 |
| ncgl0767 | pcg2613 | FALSE | 4 |
| ncgl0768 | pcg0007_39 | FALSE | 3 |
| ncgl0768 | pcg0007_39 | TRUE | 3 |
| ncgl0768 | pcg3121 | FALSE | 3 |
| ncgl0768 | pcg3381 | FALSE | 3 |
| ncgl0780 | pcg0007 | TRUE | 1 |
| ncgl0780 | pcg0007_265 | TRUE | 1 |
| ncgl0780 | pcg0755 | TRUE | 1 |
| ncgl0780 | pcg3121 | TRUE | 1 |
| ncgl0780 | pcg3381 | TRUE | 1 |
| ncgl0817 | pcg0007 | TRUE | 1 |
| ncgl0817 | pcg0007_119 | FALSE | 1 |
| ncgl0817 | pcg0007_119 | TRUE | 1 |
| ncgl0817 | pcg0007_265 | TRUE | 1 |
| ncgl0817 | pcg0007_39 | TRUE | 1 |
| ncgl0817 | pcg0755 | FALSE | 1 |
| ncgl0817 | pcg0755 | TRUE | 1 |
| ncgl0817 | pcg1860 | TRUE | 1 |
| ncgl0817 | pcg2613 | FALSE | 1 |
| ncgl0817 | pcg3121 | TRUE | 1 |
| ncgl0817 | pcg3121 | TRUE | 1 |
| ncgl0817 | pcg3381 | TRUE | 1 |
| ncgl0817 | pcg3381 | TRUE | 1 |
| ncgl0823 | pcg0007_39 | FALSE | 3 |
| ncgl0823 | pcg0007_39 | TRUE | 3 |
| ncgl0823 | pcg3381 | FALSE | 3 |
| ncgl0827 | pcg0007_39 | TRUE | 4 |
| ncgl0827 | pcg3381 | FALSE | 4 |
| ncgl0847 | pcg0007_39 | TRUE | 2 |
| ncgl0847 | pcg0755 | FALSE | 2 |
| ncgl0847 | pcg2613 | FALSE | 2 |
| ncgl0847 | pcg3381 | FALSE | 2 |
| ncgl0860 | pcg0007_39 | TRUE | 4 |
| ncgl0861 | pcg0007_39 | TRUE | 3 |
| ncgl0861 | pcg1860 | TRUE | 3 |
| ncgl0861 | pcg3381 | FALSE | 3 |
| ncgl0865 | pcg0007_39 | FALSE | 1 |
| ncgl0865 | pcg0755 | FALSE | 1 |
| ncgl0865 | pcg3121 | TRUE | 1 |
| ncgl0865 | pcg3381 | FALSE | 1 |
| ncgl0877 | pcg0007_119 | FALSE | 4 |
| ncgl0877 | pcg0007_39 | TRUE | 4 |
| ncgl0877 | pcg3381 | FALSE | 4 |
| ncgl0877 | wt | FALSE | 4 |
| ncgl0893 | pcg0007_39 | TRUE | 3 |
| ncgl0893 | pcg3121 | FALSE | 3 |
| ncgl0893 | pcg3381 | FALSE | 3 |
| ncgl0897 | pcg0007_39 | TRUE | 3 |
| ncgl0897 | pcg3381 | FALSE | 3 |
| ncgl0901 | pcg0007_39 | TRUE | 3 |
| ncgl0901 | pcg1860 | TRUE | 3 |
| ncgl0901 | pcg3121 | FALSE | 3 |
| ncgl0901 | pcg3381 | FALSE | 3 |
| ncgl0909 | pcg0007_39 | FALSE | 3 |
| ncgl0909 | pcg3121 | TRUE | 3 |
| ncgl0909 | pcg3381 | FALSE | 3 |
| ncgl0965 | pcg1860 | TRUE | 3 |
| ncgl0966 | pcg1860 | FALSE | 4 |
| ncgl0966 | pcg3121 | TRUE | 4 |
| ncgl0966 | wt | FALSE | 4 |
| ncgl0976 | pcg0007 | FALSE | 1 |
| ncgl0976 | pcg0007_119 | FALSE | 1 |
| ncgl0976 | pcg0007_39 | TRUE | 1 |
| ncgl0976 | pcg0755 | FALSE | 1 |
| ncgl0976 | pcg1860 | FALSE | 1 |
| ncgl0976 | pcg3121 | FALSE | 1 |
| ncgl0976 | pcg3381 | FALSE | 1 |
| ncgl1016 | pcg0007_39 | TRUE | 3 |
| ncgl1016 | pcg1860 | TRUE | 3 |
| ncgl1016 | pcg3121 | FALSE | 3 |
| ncgl1016 | pcg3381 | FALSE | 3 |
| ncgl1025 | pcg0007_39 | TRUE | 3 |
| ncgl1025 | pcg1860 | TRUE | 3 |
| ncgl1025 | pcg3121 | FALSE | 3 |
| ncgl1044 | pcg0007_39 | TRUE | 4 |
| ncgl1049 | pcg0007_39 | TRUE | 3 |
| ncgl1049 | pcg3381 | FALSE | 3 |
| ncgl1062 | pcg0007_39 | TRUE | 3 |
| ncgl1062 | pcg2613 | FALSE | 3 |
| ncgl1064 | pcg0007 | FALSE | 1 |
| ncgl1064 | pcg0007_119 | FALSE | 1 |
| ncgl1064 | pcg0007_39 | FALSE | 1 |
| ncgl1064 | pcg0755 | TRUE | 1 |
| ncgl1064 | pcg1860 | FALSE | 1 |
| ncgl1064 | pcg2613 | FALSE | 1 |
| ncgl1064 | pcg3381 | FALSE | 1 |
| ncgl1064 | wt | FALSE | 1 |
| ncgl1065 | pcg0007_39 | TRUE | 4 |
| ncgl1080 | pcg0007_39 | TRUE | 3 |
| ncgl1080 | pcg3121 | FALSE | 3 |
| ncgl1080 | pcg3381 | FALSE | 3 |
| ncgl1084 | pcg0007_119 | FALSE | 2 |
| ncgl1084 | pcg0007_39 | TRUE | 2 |
| ncgl1084 | wt | FALSE | 2 |
| ncgl1129 | pcg0007_39 | TRUE | 3 |
| ncgl1129 | pcg3121 | FALSE | 3 |
| ncgl1129 | pcg3381 | FALSE | 3 |
| ncgl1133 | pcg0007 | TRUE | 1 |
| ncgl1133 | pcg0007_119 | FALSE | 1 |
| ncgl1133 | pcg0007_265 | TRUE | 1 |
| ncgl1133 | pcg0007_39 | TRUE | 1 |
| ncgl1133 | pcg0755 | FALSE | 1 |
| ncgl1133 | pcg3121 | FALSE | 1 |
| ncgl1133 | pcg3381 | TRUE | 1 |
| ncgl1136 | pcg0007 | FALSE | 1 |
| ncgl1136 | pcg0007_119 | FALSE | 1 |
| ncgl1136 | pcg0007_39 | TRUE | 1 |
| ncgl1136 | pcg0755 | TRUE | 1 |
| ncgl1136 | pcg1860 | TRUE | 1 |
| ncgl1136 | pcg2613 | FALSE | 1 |
| ncgl1136 | pcg3121 | TRUE | 1 |
| ncgl1136 | pcg3381 | TRUE | 1 |
| ncgl1136 | wt | FALSE | 1 |
| ncgl1140 | pcg0007_39 | TRUE | 2 |
| ncgl1140 | pcg0755 | FALSE | 2 |
| ncgl1140 | pcg2613 | FALSE | 2 |
| ncgl1140 | pcg3121 | FALSE | 2 |
| ncgl1140 | wt | FALSE | 2 |
| ncgl1143 | pcg0007_39 | TRUE | 2 |
| ncgl1143 | pcg0007_39 | TRUE | 3 |
| ncgl1143 | pcg3121 | FALSE | 2 |
| ncgl1143 | pcg3121 | FALSE | 3 |
| ncgl1143 | pcg3381 | FALSE | 2 |
| ncgl1143 | pcg3381 | FALSE | 3 |
| ncgl1147 | pcg0007_39 | TRUE | 3 |
| ncgl1147 | pcg3121 | FALSE | 3 |
| ncgl1147 | pcg3381 | FALSE | 3 |
| ncgl1152 | pcg0007_39 | TRUE | 2 |
| ncgl1152 | pcg0007_39 | TRUE | 3 |
| ncgl1152 | pcg0755 | FALSE | 2 |
| ncgl1152 | pcg0755 | FALSE | 3 |
| ncgl1152 | pcg1860 | FALSE | 2 |
| ncgl1152 | pcg1860 | FALSE | 3 |
| ncgl1152 | pcg3381 | FALSE | 2 |
| ncgl1152 | pcg3381 | FALSE | 3 |
| ncgl1152 | wt | FALSE | 2 |
| ncgl1152 | wt | FALSE | 3 |
| ncgl1175 | pcg0007_39 | TRUE | 3 |
| ncgl1175 | pcg1860 | TRUE | 3 |
| ncgl1175 | pcg3381 | FALSE | 3 |
| ncgl1179 | pcg0007_39 | TRUE | 3 |
| ncgl1179 | pcg0755 | FALSE | 3 |
| ncgl1179 | pcg1860 | FALSE | 3 |
| ncgl1179 | pcg2613 | FALSE | 3 |
| ncgl1179 | pcg3121 | FALSE | 3 |
| ncgl1179 | pcg3381 | FALSE | 3 |
| ncgl1179 | wt | FALSE | 3 |
| ncgl1181 | pcg0007_39 | TRUE | 3 |
| ncgl1181 | pcg3121 | FALSE | 3 |
| ncgl1181 | pcg3381 | FALSE | 3 |
| ncgl1202 | pcg0007 | FALSE | 4 |
| ncgl1202 | pcg0007_265 | FALSE | 4 |
| ncgl1202 | pcg0007_39 | FALSE | 4 |
| ncgl1202 | pcg1860 | FALSE | 4 |
| ncgl1202 | pcg3381 | TRUE | 4 |
| ncgl1203 | pcg0007_39 | TRUE | 3 |
| ncgl1203 | pcg3381 | FALSE | 3 |
| ncgl1208 | pcg0007_39 | TRUE | 4 |
| ncgl1209 | pcg0007_39 | TRUE | 3 |
| ncgl1209 | pcg1860 | TRUE | 3 |
| ncgl1209 | pcg3121 | FALSE | 3 |
| ncgl1209 | pcg3121 | FALSE | 3 |
| ncgl1209 | pcg3381 | FALSE | 3 |
| ncgl1209 | pcg3381 | FALSE | 3 |
| ncgl1214 | pcg0007 | TRUE | 1 |
| ncgl1214 | pcg0007_119 | TRUE | 1 |
| ncgl1214 | pcg0007_265 | FALSE | 1 |
| ncgl1214 | pcg0007_39 | TRUE | 1 |
| ncgl1214 | pcg0755 | FALSE | 1 |
| ncgl1214 | pcg1860 | FALSE | 1 |
| ncgl1214 | pcg3121 | FALSE | 1 |
| ncgl1214 | pcg3381 | FALSE | 1 |
| ncgl1224 | pcg0007_39 | TRUE | 4 |
| ncgl1241 | pcg0007 | TRUE | 1 |
| ncgl1241 | pcg0007_119 | FALSE | 1 |
| ncgl1241 | pcg0007_39 | TRUE | 1 |
| ncgl1241 | pcg0755 | FALSE | 1 |
| ncgl1241 | pcg1860 | FALSE | 1 |
| ncgl1241 | pcg3121 | FALSE | 1 |
| ncgl1241 | pcg3381 | FALSE | 1 |
| ncgl1261 | pcg0007_119 | FALSE | 3 |
| ncgl1261 | pcg0007_39 | TRUE | 3 |
| ncgl1261 | pcg0755 | FALSE | 3 |
| ncgl1261 | pcg2613 | FALSE | 3 |
| ncgl1261 | pcg3381 | FALSE | 3 |
| ncgl1261 | wt | FALSE | 3 |
| ncgl1262 | pcg0007_39 | TRUE | 4 |
| ncgl1262 | pcg0755 | TRUE | 4 |
| ncgl1262 | pcg1860 | TRUE | 4 |
| ncgl1262 | pcg2613 | TRUE | 4 |
| ncgl1262 | pcg3121 | FALSE | 4 |
| ncgl1262 | pcg3381 | FALSE | 4 |
| ncgl1262 | wt | FALSE | 4 |
| ncgl1263 | pcg0007_39 | TRUE | 4 |
| ncgl1263 | pcg3381 | FALSE | 4 |
| ncgl1267 | pcg0007_39 | TRUE | 3 |
| ncgl1267 | pcg0755 | FALSE | 3 |
| ncgl1267 | pcg1860 | FALSE | 3 |
| ncgl1267 | pcg2613 | FALSE | 3 |
| ncgl1267 | pcg3381 | FALSE | 3 |
| ncgl1267 | wt | FALSE | 3 |
| ncgl1267 | wt | FALSE | 3 |
| ncgl1267 | wt | FALSE | 3 |
| ncgl1267 | wt | FALSE | 3 |
| ncgl1267 | wt | FALSE | 3 |
| ncgl1267 | wt | FALSE | 3 |
| ncgl1267 | wt | FALSE | 3 |
| ncgl1277 | pcg0007_39 | TRUE | 3 |
| ncgl1277 | pcg0755 | FALSE | 3 |
| ncgl1277 | pcg2613 | FALSE | 3 |
| ncgl1277 | pcg3121 | FALSE | 3 |
| ncgl1277 | pcg3381 | FALSE | 3 |
| ncgl1277 | wt | FALSE | 3 |
| ncgl1301 | pcg0007_119 | FALSE | 3 |
| ncgl1301 | pcg0007_39 | TRUE | 3 |
| ncgl1301 | pcg1860 | FALSE | 3 |
| ncgl1301 | pcg2613 | FALSE | 3 |
| ncgl1301 | pcg3121 | FALSE | 3 |
| ncgl1301 | pcg3381 | FALSE | 3 |
| ncgl1305 | pcg0007 | FALSE | 1 |
| ncgl1305 | pcg0007 | FALSE | 3 |
| ncgl1305 | pcg0007 | FALSE | 1 |
| ncgl1305 | pcg0007 | FALSE | 3 |
| ncgl1305 | pcg0007_265 | TRUE | 1 |
| ncgl1305 | pcg0007_265 | TRUE | 3 |
| ncgl1305 | pcg0007_39 | FALSE | 1 |
| ncgl1305 | pcg0007_39 | FALSE | 3 |
| ncgl1305 | pcg0007_39 | TRUE | 1 |
| ncgl1305 | pcg0007_39 | TRUE | 3 |
| ncgl1305 | pcg0755 | TRUE | 1 |
| ncgl1305 | pcg0755 | TRUE | 3 |
| ncgl1305 | pcg0755 | FALSE | 1 |
| ncgl1305 | pcg0755 | FALSE | 3 |
| ncgl1305 | pcg1860 | TRUE | 1 |
| ncgl1305 | pcg1860 | TRUE | 3 |
| ncgl1305 | pcg1860 | TRUE | 1 |
| ncgl1305 | pcg1860 | TRUE | 3 |
| ncgl1305 | pcg3121 | FALSE | 1 |
| ncgl1305 | pcg3121 | FALSE | 3 |
| ncgl1305 | pcg3121 | TRUE | 1 |
| ncgl1305 | pcg3121 | TRUE | 3 |
| ncgl1305 | pcg3381 | FALSE | 1 |
| ncgl1305 | pcg3381 | FALSE | 3 |
| ncgl1305 | pcg3381 | FALSE | 1 |
| ncgl1305 | pcg3381 | FALSE | 3 |
| ncgl1322 | pcg0007_39 | TRUE | 4 |
| ncgl1322 | pcg0755 | FALSE | 4 |
| ncgl1322 | pcg1860 | FALSE | 4 |
| ncgl1322 | pcg2613 | FALSE | 4 |
| ncgl1322 | pcg3121 | FALSE | 4 |
| ncgl1322 | pcg3381 | FALSE | 4 |
| ncgl1322 | wt | FALSE | 4 |
| ncgl1330 | pcg0007_39 | TRUE | 3 |
| ncgl1330 | pcg3381 | FALSE | 3 |
| ncgl1332 | pcg0007_119 | FALSE | 3 |
| ncgl1332 | pcg0007_39 | TRUE | 3 |
| ncgl1332 | pcg0755 | FALSE | 3 |
| ncgl1332 | pcg1860 | TRUE | 3 |
| ncgl1332 | pcg3121 | FALSE | 3 |
| ncgl1332 | pcg3381 | FALSE | 3 |
| ncgl1332 | wt | FALSE | 3 |
| ncgl1344 | pcg0007_39 | TRUE | 4 |
| ncgl1344 | pcg3381 | FALSE | 4 |
| ncgl1347 | pcg0007_39 | TRUE | 4 |
| ncgl1362 | pcg0007_39 | FALSE | 3 |
| ncgl1362 | pcg1860 | TRUE | 3 |
| ncgl1362 | pcg3121 | FALSE | 3 |
| ncgl1362 | pcg3381 | FALSE | 3 |
| ncgl1363 | pcg0007_39 | TRUE | 3 |
| ncgl1363 | pcg3121 | FALSE | 3 |
| ncgl1364 | pcg0007_119 | FALSE | 3 |
| ncgl1364 | pcg0007_39 | TRUE | 3 |
| ncgl1364 | pcg0755 | FALSE | 3 |
| ncgl1364 | pcg1860 | TRUE | 3 |
| ncgl1364 | pcg2613 | FALSE | 3 |
| ncgl1364 | pcg3121 | FALSE | 3 |
| ncgl1364 | pcg3381 | FALSE | 3 |
| ncgl1364 | wt | FALSE | 3 |
| ncgl1366 | pcg0007_39 | FALSE | 3 |
| ncgl1366 | pcg0007_39 | TRUE | 3 |
| ncgl1366 | pcg0007_39 | TRUE | 3 |
| ncgl1366 | pcg1860 | TRUE | 3 |
| ncgl1366 | pcg3121 | FALSE | 3 |
| ncgl1366 | pcg3121 | FALSE | 3 |
| ncgl1366 | pcg3381 | FALSE | 3 |
| ncgl1366 | pcg3381 | FALSE | 3 |
| ncgl1367 | pcg0007_39 | TRUE | 3 |
| ncgl1367 | pcg3121 | FALSE | 3 |
| ncgl1367 | pcg3381 | FALSE | 3 |
| ncgl1370 | pcg0007_39 | FALSE | 3 |
| ncgl1370 | pcg1860 | TRUE | 3 |
| ncgl1370 | pcg3121 | FALSE | 3 |
| ncgl1370 | pcg3381 | FALSE | 3 |
| ncgl1371 | pcg0007_119 | FALSE | 3 |
| ncgl1371 | pcg0007_39 | TRUE | 3 |
| ncgl1371 | pcg0755 | FALSE | 3 |
| ncgl1371 | pcg1860 | FALSE | 3 |
| ncgl1371 | pcg2613 | FALSE | 3 |
| ncgl1371 | wt | FALSE | 3 |
| ncgl1372 | pcg0007_39 | TRUE | 3 |
| ncgl1372 | pcg1860 | TRUE | 3 |
| ncgl1372 | pcg3121 | FALSE | 3 |
| ncgl1372 | pcg3381 | FALSE | 3 |
| ncgl1378 | pcg0007_39 | TRUE | 3 |
| ncgl1378 | pcg3121 | FALSE | 3 |
| ncgl1399 | pcg0007_39 | TRUE | 3 |
| ncgl1399 | pcg3121 | FALSE | 3 |
| ncgl1399 | pcg3381 | FALSE | 3 |
| ncgl1402 | pcg0007_39 | FALSE | 3 |
| ncgl1402 | pcg1860 | TRUE | 3 |
| ncgl1454 | pcg0007_39 | TRUE | 3 |
| ncgl1454 | pcg3121 | FALSE | 3 |
| ncgl1454 | pcg3381 | FALSE | 3 |
| ncgl1455 | pcg0007_39 | TRUE | 3 |
| ncgl1455 | pcg3121 | FALSE | 3 |
| ncgl1455 | pcg3381 | FALSE | 3 |
| ncgl1484 | pcg0007_119 | FALSE | 4 |
| ncgl1484 | pcg0007_39 | TRUE | 4 |
| ncgl1484 | pcg0755 | FALSE | 4 |
| ncgl1484 | pcg2613 | FALSE | 4 |
| ncgl1484 | pcg3121 | FALSE | 4 |
| ncgl1484 | wt | FALSE | 4 |
| ncgl1506 | pcg0007_39 | TRUE | 3 |
| ncgl1506 | pcg1860 | TRUE | 3 |
| ncgl1506 | pcg3121 | FALSE | 3 |
| ncgl1506 | pcg3381 | FALSE | 3 |
| ncgl1507 | pcg1860 | TRUE | 3 |
| ncgl1507 | pcg3121 | FALSE | 3 |
| ncgl1507 | pcg3381 | FALSE | 3 |
| ncgl1511 | pcg0007_119 | FALSE | 4 |
| ncgl1511 | pcg0007_39 | TRUE | 4 |
| ncgl1511 | pcg0755 | FALSE | 4 |
| ncgl1511 | pcg2613 | FALSE | 4 |
| ncgl1511 | pcg3121 | FALSE | 4 |
| ncgl1511 | pcg3381 | FALSE | 4 |
| ncgl1511 | wt | FALSE | 4 |
| ncgl1512 | pcg0007 | FALSE | 1 |
| ncgl1512 | pcg0007_39 | FALSE | 1 |
| ncgl1512 | pcg0007_39 | TRUE | 1 |
| ncgl1512 | pcg0755 | FALSE | 1 |
| ncgl1512 | pcg0755 | FALSE | 1 |
| ncgl1512 | pcg1860 | FALSE | 1 |
| ncgl1512 | pcg1860 | TRUE | 1 |
| ncgl1512 | pcg3381 | FALSE | 1 |
| ncgl1512 | pcg3381 | TRUE | 1 |
| ncgl1514 | pcg0007 | TRUE | 1 |
| ncgl1514 | pcg0007_119 | TRUE | 1 |
| ncgl1514 | pcg0007_265 | FALSE | 1 |
| ncgl1514 | pcg0007_39 | TRUE | 1 |
| ncgl1514 | pcg0755 | FALSE | 1 |
| ncgl1514 | pcg1860 | FALSE | 1 |
| ncgl1514 | pcg3121 | FALSE | 1 |
| ncgl1514 | pcg3381 | TRUE | 1 |
| ncgl1521 | pcg0007_39 | TRUE | 2 |
| ncgl1521 | pcg0007_39 | TRUE | 3 |
| ncgl1521 | pcg1860 | FALSE | 2 |
| ncgl1521 | pcg1860 | FALSE | 3 |
| ncgl1521 | pcg3121 | FALSE | 2 |
| ncgl1521 | pcg3121 | FALSE | 3 |
| ncgl1523 | pcg0007 | FALSE | 1 |
| ncgl1523 | pcg0007_119 | FALSE | 1 |
| ncgl1523 | pcg0007_39 | TRUE | 1 |
| ncgl1523 | pcg0755 | TRUE | 1 |
| ncgl1523 | pcg1860 | FALSE | 1 |
| ncgl1523 | pcg3121 | TRUE | 1 |
| ncgl1525 | pcg0007_39 | FALSE | 4 |
| ncgl1525 | pcg3381 | TRUE | 4 |
| ncgl1545 | pcg0007_39 | TRUE | 4 |
| ncgl1545 | wt | FALSE | 4 |
| ncgl1590 | pcg3381 | FALSE | 4 |
| ncgl1590 | wt | FALSE | 4 |
| ncgl1590 | wt | FALSE | 4 |
| ncgl1590 | wt | FALSE | 4 |
| ncgl1590 | wt | TRUE | 4 |
| ncgl1592 | pcg0007_39 | TRUE | 3 |
| ncgl1592 | pcg3121 | FALSE | 3 |
| ncgl1592 | pcg3381 | FALSE | 3 |
| ncgl1607 | pcg0007_39 | TRUE | 4 |
| ncgl1607 | pcg0755 | FALSE | 4 |
| ncgl1607 | pcg2613 | FALSE | 4 |
| ncgl1607 | wt | FALSE | 4 |
| ncgl1817 | pcg0007_39 | TRUE | 3 |
| ncgl1817 | pcg1860 | TRUE | 3 |
| ncgl1817 | pcg3121 | FALSE | 3 |
| ncgl1817 | pcg3381 | FALSE | 3 |
| ncgl1844 | pcg0007_39 | TRUE | 3 |
| ncgl1844 | pcg1860 | TRUE | 3 |
| ncgl1868 | pcg0007 | TRUE | 1 |
| ncgl1868 | pcg0007_119 | TRUE | 1 |
| ncgl1868 | pcg0007_39 | TRUE | 1 |
| ncgl1868 | pcg0755 | TRUE | 1 |
| ncgl1868 | pcg1860 | TRUE | 1 |
| ncgl1868 | pcg3121 | FALSE | 1 |
| ncgl1868 | pcg3381 | FALSE | 1 |
| ncgl1875 | pcg0007_39 | TRUE | 3 |
| ncgl1875 | pcg1860 | TRUE | 3 |
| ncgl1875 | pcg3121 | FALSE | 3 |
| ncgl1875 | pcg3381 | FALSE | 3 |
| ncgl1875 | pcg3381 | FALSE | 3 |
| ncgl1877 | pcg0007_39 | TRUE | 3 |
| ncgl1877 | pcg3121 | FALSE | 3 |
| ncgl1885 | pcg0007_39 | TRUE | 3 |
| ncgl1885 | pcg1860 | TRUE | 3 |
| ncgl1896 | pcg0007 | FALSE | 1 |
| ncgl1896 | pcg0007 | FALSE | 1 |
| ncgl1896 | pcg0007_265 | FALSE | 1 |
| ncgl1896 | pcg0007_265 | FALSE | 1 |
| ncgl1896 | pcg0007_39 | TRUE | 1 |
| ncgl1896 | pcg0007_39 | FALSE | 1 |
| ncgl1896 | pcg0755 | FALSE | 1 |
| ncgl1896 | pcg1860 | FALSE | 1 |
| ncgl1896 | pcg3121 | FALSE | 1 |
| ncgl1896 | pcg3381 | FALSE | 1 |
| ncgl1896 | pcg3381 | FALSE | 1 |
| ncgl1896 | wt | FALSE | 1 |
| ncgl1898 | pcg0007_265 | TRUE | 1 |
| ncgl1898 | pcg0755 | FALSE | 1 |
| ncgl1898 | pcg1860 | FALSE | 1 |
| ncgl1899 | pcg0007_39 | TRUE | 3 |
| ncgl1899 | pcg3381 | FALSE | 3 |
| ncgl1911 | pcg0007_119 | FALSE | 3 |
| ncgl1911 | pcg0007_39 | TRUE | 3 |
| ncgl1911 | pcg0755 | FALSE | 3 |
| ncgl1911 | pcg1860 | TRUE | 3 |
| ncgl1911 | pcg2613 | FALSE | 3 |
| ncgl1911 | pcg3121 | FALSE | 3 |
| ncgl1911 | pcg3121 | FALSE | 3 |
| ncgl1911 | pcg3381 | FALSE | 3 |
| ncgl1911 | pcg3381 | FALSE | 3 |
| ncgl1912 | pcg0007_39 | TRUE | 3 |
| ncgl1913 | pcg0007_39 | TRUE | 3 |
| ncgl1913 | pcg3121 | FALSE | 3 |
| ncgl1913 | pcg3381 | FALSE | 3 |
| ncgl1915 | pcg0007_39 | FALSE | 3 |
| ncgl1915 | pcg0007_39 | TRUE | 3 |
| ncgl1915 | pcg3121 | FALSE | 3 |
| ncgl1917 | pcg0007_39 | TRUE | 3 |
| ncgl1917 | pcg3381 | FALSE | 3 |
| ncgl1918 | pcg1860 | TRUE | 3 |
| ncgl1918 | pcg3121 | FALSE | 3 |
| ncgl1926 | pcg0007_39 | FALSE | 2 |
| ncgl1926 | pcg1860 | FALSE | 2 |
| ncgl1926 | pcg3121 | FALSE | 2 |
| ncgl1926 | pcg3381 | TRUE | 2 |
| ncgl1948 | pcg0007_39 | TRUE | 4 |
| ncgl1948 | wt | FALSE | 4 |
| ncgl1978 | pcg0007_39 | TRUE | 3 |
| ncgl1978 | pcg3121 | FALSE | 3 |
| ncgl1997 | pcg0007_119 | FALSE | 3 |
| ncgl1997 | pcg0007_39 | TRUE | 3 |
| ncgl1997 | pcg0755 | FALSE | 3 |
| ncgl1997 | pcg1860 | FALSE | 3 |
| ncgl1997 | pcg2613 | TRUE | 3 |
| ncgl1997 | pcg3121 | FALSE | 3 |
| ncgl1997 | pcg3381 | FALSE | 3 |
| ncgl1997 | wt | FALSE | 3 |
| ncgl2017 | pcg0007_39 | TRUE | 3 |
| ncgl2017 | pcg3381 | FALSE | 3 |
| ncgl2025 | pcg0007_39 | TRUE | 3 |
| ncgl2025 | pcg1860 | TRUE | 3 |
| ncgl2031 | pcg0007_39 | TRUE | 3 |
| ncgl2031 | pcg3121 | FALSE | 3 |
| ncgl2031 | pcg3381 | FALSE | 3 |
| ncgl2032 | pcg0007_39 | TRUE | 3 |
| ncgl2032 | pcg3121 | FALSE | 3 |
| ncgl2032 | pcg3381 | FALSE | 3 |
| ncgl2060 | pcg0007_39 | TRUE | 3 |
| ncgl2060 | pcg1860 | TRUE | 3 |
| ncgl2060 | pcg3121 | FALSE | 3 |
| ncgl2066 | pcg0007_39 | TRUE | 3 |
| ncgl2066 | pcg1860 | TRUE | 3 |
| ncgl2066 | pcg3121 | FALSE | 3 |
| ncgl2066 | pcg3381 | FALSE | 3 |
| ncgl2081 | pcg0007_39 | TRUE | 3 |
| ncgl2082 | pcg0007_39 | TRUE | 3 |
| ncgl2082 | pcg3381 | FALSE | 3 |
| ncgl2083 | pcg0007_39 | TRUE | 3 |
| ncgl2083 | pcg0755 | FALSE | 3 |
| ncgl2083 | wt | FALSE | 3 |
| ncgl2084 | pcg0007_39 | TRUE | 3 |
| ncgl2084 | pcg3381 | FALSE | 3 |
| ncgl2091 | pcg0007_39 | TRUE | 4 |
| ncgl2091 | pcg3381 | FALSE | 4 |
| ncgl2104 | pcg0007_39 | TRUE | 3 |
| ncgl2104 | pcg0007_39 | TRUE | 3 |
| ncgl2104 | pcg3121 | FALSE | 3 |
| ncgl2104 | pcg3121 | FALSE | 3 |
| ncgl2104 | pcg3381 | FALSE | 3 |
| ncgl2104 | wt | FALSE | 3 |
| ncgl2126 | pcg0007 | FALSE | 2 |
| ncgl2126 | pcg0007_39 | FALSE | 2 |
| ncgl2126 | pcg1860 | TRUE | 2 |
| ncgl2126 | pcg3121 | FALSE | 2 |
| ncgl2133 | pcg0007_39 | TRUE | 2 |
| ncgl2133 | pcg0007_39 | TRUE | 3 |
| ncgl2133 | pcg1860 | FALSE | 2 |
| ncgl2133 | pcg1860 | FALSE | 3 |
| ncgl2133 | wt | FALSE | 2 |
| ncgl2133 | wt | FALSE | 3 |
| ncgl2163 | pcg0007_39 | TRUE | 3 |
| ncgl2163 | pcg1860 | TRUE | 3 |
| ncgl2167 | pcg0007_39 | FALSE | 2 |
| ncgl2167 | pcg0007_39 | FALSE | 2 |
| ncgl2167 | pcg0755 | FALSE | 2 |
| ncgl2167 | pcg1860 | FALSE | 2 |
| ncgl2167 | pcg1860 | TRUE | 2 |
| ncgl2167 | pcg2613 | FALSE | 2 |
| ncgl2167 | pcg3121 | FALSE | 2 |
| ncgl2167 | pcg3381 | FALSE | 2 |
| ncgl2167 | pcg3381 | TRUE | 2 |
| ncgl2168 | pcg0007_39 | TRUE | 3 |
| ncgl2169 | pcg0007_39 | TRUE | 3 |
| ncgl2169 | pcg0755_promoter | FALSE | 3 |
| ncgl2169 | pcg1860 | TRUE | 3 |
| ncgl2169 | pcg3121 | FALSE | 3 |
| ncgl2169 | pcg3381 | FALSE | 3 |
| ncgl2211 | pcg0007_39 | TRUE | 3 |
| ncgl2211 | pcg3381 | FALSE | 3 |
| ncgl2230 | pcg0007_39 | FALSE | 3 |
| ncgl2230 | pcg0007_39 | TRUE | 3 |
| ncgl2230 | pcg0007_39 | TRUE | 3 |
| ncgl2230 | pcg3121 | FALSE | 3 |
| ncgl2230 | pcg3381 | FALSE | 3 |
| ncgl2239 | pcg0007_39 | TRUE | 3 |
| ncgl2239 | pcg3121 | FALSE | 3 |
| ncgl2239 | pcg3381 | FALSE | 3 |
| ncgl2240 | pcg0007_119 | FALSE | 3 |
| ncgl2240 | pcg0007_39 | TRUE | 3 |
| ncgl2240 | pcg0755 | FALSE | 3 |
| ncgl2240 | pcg1860 | TRUE | 3 |
| ncgl2240 | pcg2613 | FALSE | 3 |
| ncgl2240 | pcg3121 | FALSE | 3 |
| ncgl2240 | pcg3381 | FALSE | 3 |
| ncgl2240 | wt | FALSE | 3 |
| ncgl2241 | pcg0007_39 | FALSE | 3 |
| ncgl2241 | pcg1860 | TRUE | 3 |
| ncgl2241 | pcg3121 | FALSE | 3 |
| ncgl2241 | pcg3381 | FALSE | 3 |
| ncgl2245 | pcg0007_39 | TRUE | 3 |
| ncgl2245 | pcg3121 | FALSE | 3 |
| ncgl2245 | pcg3381 | FALSE | 3 |
| ncgl2250 | pcg0007_119 | FALSE | 4 |
| ncgl2250 | pcg0007_39 | TRUE | 4 |
| ncgl2250 | pcg0755 | FALSE | 4 |
| ncgl2250 | pcg2613 | FALSE | 4 |
| ncgl2250 | pcg3121 | FALSE | 4 |
| ncgl2250 | pcg3381 | FALSE | 4 |
| ncgl2257 | pcg0007_39 | TRUE | 3 |
| ncgl2257 | pcg3121 | FALSE | 3 |
| ncgl2257 | pcg3381 | FALSE | 3 |
| ncgl2298 | pcg0007_39 | TRUE | 3 |
| ncgl2298 | pcg0007_39 | TRUE | 3 |
| ncgl2298 | pcg1860 | FALSE | 3 |
| ncgl2298 | pcg3381 | FALSE | 3 |
| ncgl2327 | pcg0007_39 | TRUE | 4 |
| ncgl2327 | pcg2613 | FALSE | 4 |
| ncgl2327 | pcg3381 | FALSE | 4 |
| ncgl2327 | wt | FALSE | 4 |
| ncgl2350 | pcg0007_39 | TRUE | 3 |
| ncgl2350 | pcg3121 | FALSE | 3 |
| ncgl2350 | pcg3381 | FALSE | 3 |
| ncgl2373 | pcg0007_39 | TRUE | 3 |
| ncgl2374 | pcg0007_39 | TRUE | 3 |
| ncgl2377 | pcg0007_39 | TRUE | 3 |
| ncgl2377 | pcg3121 | FALSE | 3 |
| ncgl2385 | pcg0007_39 | TRUE | 3 |
| ncgl2385 | pcg3381 | FALSE | 3 |
| ncgl2405 | pcg0007_39 | FALSE | 3 |
| ncgl2405 | pcg1860 | TRUE | 3 |
| ncgl2406 | pcg0007_39 | TRUE | 3 |
| ncgl2406 | pcg3121 | FALSE | 3 |
| ncgl2406 | pcg3381 | FALSE | 3 |
| ncgl2425 | pcg0007_119 | FALSE | 3 |
| ncgl2425 | pcg0007_39 | TRUE | 3 |
| ncgl2425 | pcg3121 | FALSE | 3 |
| ncgl2425 | pcg3381 | FALSE | 3 |
| ncgl2425 | wt | FALSE | 3 |
| ncgl2440 | pcg0007_39 | FALSE | 3 |
| ncgl2440 | pcg1860 | FALSE | 3 |
| ncgl2440 | pcg3121 | TRUE | 3 |
| ncgl2440 | pcg3381 | FALSE | 3 |
| ncgl2449 | pcg0007_39 | TRUE | 4 |
| ncgl2449 | wt | FALSE | 4 |
| ncgl2465 | pcg0007_39 | FALSE | 3 |
| ncgl2465 | pcg0007_39 | TRUE | 3 |
| ncgl2465 | pcg3381 | FALSE | 3 |
| ncgl2481 | pcg0007_39 | TRUE | 4 |
| ncgl2481 | wt | FALSE | 4 |
| ncgl2482 | pcg0007_39 | TRUE | 3 |
| ncgl2482 | pcg0007_39 | FALSE | 3 |
| ncgl2482 | pcg0755 | FALSE | 3 |
| ncgl2482 | pcg2613 | FALSE | 3 |
| ncgl2482 | pcg3121 | FALSE | 3 |
| ncgl2482 | pcg3381 | TRUE | 3 |
| ncgl2482 | pcg3381 | FALSE | 3 |
| ncgl2482 | wt | FALSE | 3 |
| ncgl2483 | pcg0007_39 | TRUE | 3 |
| ncgl2483 | pcg1860 | TRUE | 3 |
| ncgl2483 | pcg3381 | FALSE | 3 |
| ncgl2485 | pcg0007_39 | TRUE | 3 |
| ncgl2485 | pcg3381 | FALSE | 3 |
| ncgl2491 | pcg0007_119 | FALSE | 4 |
| ncgl2491 | pcg0007_39 | TRUE | 4 |
| ncgl2491 | pcg2613 | FALSE | 4 |
| ncgl2491 | pcg3381 | FALSE | 4 |
| ncgl2491 | wt | FALSE | 4 |
| ncgl2499 | pcg0007_39 | TRUE | 4 |
| ncgl2500 | pcg0007_39 | TRUE | 4 |
| ncgl2500 | pcg3381 | FALSE | 4 |
| ncgl2509 | pcg0007_39 | TRUE | 4 |
| ncgl2509 | pcg2613 | FALSE | 4 |
| ncgl2509 | pcg3121 | FALSE | 4 |
| ncgl2509 | pcg3381 | FALSE | 4 |
| ncgl2509 | wt | FALSE | 4 |
| ncgl2514 | pcg0007_39 | TRUE | 3 |
| ncgl2514 | pcg3121 | FALSE | 3 |
| ncgl2514 | pcg3381 | FALSE | 3 |
| ncgl2516 | pcg0007_39 | TRUE | 3 |
| ncgl2516 | pcg3381 | FALSE | 3 |
| ncgl2527 | pcg0007_39 | TRUE | 3 |
| ncgl2527 | pcg0007_39 | TRUE | 3 |
| ncgl2527 | pcg2613 | FALSE | 3 |
| ncgl2527 | pcg3381 | FALSE | 3 |
| ncgl2527 | pcg3381 | FALSE | 3 |
| ncgl2527 | wt | FALSE | 3 |
| ncgl2541 | pcg0007_119 | FALSE | 3 |
| ncgl2541 | pcg0007_39 | TRUE | 3 |
| ncgl2541 | pcg1860 | FALSE | 3 |
| ncgl2541 | pcg2613 | FALSE | 3 |
| ncgl2541 | pcg3121 | FALSE | 3 |
| ncgl2541 | pcg3381 | FALSE | 3 |
| ncgl2541 | wt | FALSE | 3 |
| ncgl2553 | pcg0007_39 | FALSE | 3 |
| ncgl2553 | pcg0007_39 | TRUE | 3 |
| ncgl2553 | pcg3121 | FALSE | 3 |
| ncgl2572 | pcg1860 | TRUE | 3 |
| ncgl2572 | pcg3121 | FALSE | 3 |
| ncgl2587 | pcg0007_119 | FALSE | 3 |
| ncgl2587 | pcg0007_39 | TRUE | 3 |
| ncgl2587 | pcg0755 | FALSE | 3 |
| ncgl2587 | pcg1860 | TRUE | 3 |
| ncgl2587 | pcg2613 | FALSE | 3 |
| ncgl2587 | pcg3121 | FALSE | 3 |
| ncgl2587 | pcg3381 | FALSE | 3 |
| ncgl2587 | wt | FALSE | 3 |
| ncgl2599 | pcg0007_39 | FALSE | 4 |
| ncgl2599 | pcg3381 | TRUE | 4 |
| ncgl2614 | pcg0007_39 | TRUE | 3 |
| ncgl2614 | pcg3121 | FALSE | 3 |
| ncgl2614 | pcg3381 | FALSE | 3 |
| ncgl2650 | pcg0007_39 | TRUE | 3 |
| ncgl2650 | pcg3121 | FALSE | 3 |
| ncgl2650 | pcg3381 | FALSE | 3 |
| ncgl2684 | pcg0007_39 | FALSE | 3 |
| ncgl2684 | pcg0007_39 | TRUE | 3 |
| ncgl2684 | pcg1860 | FALSE | 3 |
| ncgl2684 | pcg3121 | FALSE | 3 |
| ncgl2684 | pcg3381 | FALSE | 3 |
| ncgl2699 | pcg0007_39 | TRUE | 3 |
| ncgl2699 | pcg1860 | FALSE | 3 |
| ncgl2699 | pcg3121 | FALSE | 3 |
| ncgl2699 | pcg3381 | FALSE | 3 |
| ncgl2713 | pcg0007_39 | TRUE | 3 |
| ncgl2713 | pcg3381 | FALSE | 3 |
| ncgl2717 | pcg0007_39 | TRUE | 4 |
| ncgl2724 | pcg0007_39 | TRUE | 3 |
| ncgl2724 | pcg3121 | FALSE | 3 |
| ncgl2724 | pcg3381 | FALSE | 3 |
| ncgl2725 | pcg0007_39 | TRUE | 3 |
| ncgl2725 | pcg3381 | FALSE | 3 |
| ncgl2726 | pcg0007_39 | TRUE | 3 |
| ncgl2733 | pcg0007_39 | TRUE | 3 |
| ncgl2733 | pcg1860 | TRUE | 3 |
| ncgl2765 | pcg0007 | FALSE | 1 |
| ncgl2765 | pcg0007 | FALSE | 2 |
| ncgl2765 | pcg0007_119 | FALSE | 1 |
| ncgl2765 | pcg0007_119 | FALSE | 2 |
| ncgl2765 | pcg0007_39 | FALSE | 1 |
| ncgl2765 | pcg0007_39 | FALSE | 2 |
| ncgl2765 | pcg0755 | TRUE | 1 |
| ncgl2765 | pcg0755 | TRUE | 2 |
| ncgl2765 | pcg1860 | FALSE | 1 |
| ncgl2765 | pcg1860 | FALSE | 2 |
| ncgl2765 | pcg3121 | FALSE | 1 |
| ncgl2765 | pcg3121 | FALSE | 2 |
| ncgl2765 | wt | FALSE | 1 |
| ncgl2765 | wt | FALSE | 2 |
| ncgl2765 | wt | FALSE | 1 |
| ncgl2765 | wt | FALSE | 2 |
| ncgl2765 | wt | FALSE | 1 |
| ncgl2765 | wt | FALSE | 2 |
| ncgl2765 | wt | FALSE | 1 |
| ncgl2765 | wt | FALSE | 2 |
| ncgl2765 | wt | FALSE | 1 |
| ncgl2765 | wt | FALSE | 2 |
| ncgl2765 | wt | FALSE | 1 |
| ncgl2765 | wt | FALSE | 2 |
| ncgl2765 | wt | FALSE | 1 |
| ncgl2765 | wt | FALSE | 2 |
| ncgl2765 | wt | FALSE | 1 |
| ncgl2765 | wt | FALSE | 2 |
| ncgl2765 | wt | FALSE | 1 |
| ncgl2765 | wt | FALSE | 2 |
| ncgl2765 | wt | FALSE | 1 |
| ncgl2765 | wt | FALSE | 2 |
| ncgl2765 | wt | FALSE | 1 |
| ncgl2765 | wt | FALSE | 2 |
| ncgl2765 | wt | FALSE | 1 |
| ncgl2765 | wt | FALSE | 2 |
| ncgl2765 | wt | FALSE | 1 |
| ncgl2765 | wt | FALSE | 2 |
| ncgl2765 | wt | FALSE | 1 |
| ncgl2765 | wt | FALSE | 2 |
| ncgl2765 | wt | FALSE | 1 |
| ncgl2765 | wt | FALSE | 2 |
| ncgl2765 | wt | FALSE | 1 |
| ncgl2765 | wt | FALSE | 2 |
| ncgl2765 | wt | FALSE | 1 |
| ncgl2765 | wt | FALSE | 2 |
| ncgl2765 | wt | FALSE | 1 |
| ncgl2765 | wt | FALSE | 2 |
| ncgl2765 | wt | FALSE | 1 |
| ncgl2765 | wt | FALSE | 2 |
| ncgl2765 | wt | FALSE | 1 |
| ncgl2765 | wt | FALSE | 2 |
| ncgl2765 | wt | FALSE | 1 |
| ncgl2765 | wt | FALSE | 2 |
| ncgl2765 | wt | FALSE | 1 |
| ncgl2765 | wt | FALSE | 2 |
| ncgl2765 | wt | FALSE | 1 |
| ncgl2765 | wt | FALSE | 2 |
| ncgl2765 | wt | FALSE | 1 |
| ncgl2765 | wt | FALSE | 2 |
| ncgl2765 | wt | FALSE | 1 |
| ncgl2765 | wt | FALSE | 2 |
| ncgl2765 | wt | FALSE | 1 |
| ncgl2765 | wt | FALSE | 2 |
| ncgl2772 | pcg0007_119 | FALSE | 3 |
| ncgl2772 | pcg0007_39 | TRUE | 3 |
| ncgl2772 | pcg0755 | FALSE | 3 |
| ncgl2772 | pcg2613 | FALSE | 3 |
| ncgl2772 | pcg3121 | TRUE | 3 |
| ncgl2772 | pcg3381 | FALSE | 3 |
| ncgl2774 | pcg0007_39 | FALSE | 3 |
| ncgl2774 | pcg0007_39 | TRUE | 3 |
| ncgl2792 | pcg0007_39 | TRUE | 3 |
| ncgl2792 | pcg3121 | FALSE | 3 |
| ncgl2792 | pcg3381 | FALSE | 3 |
| ncgl2802 | pcg0007_39 | TRUE | 3 |
| ncgl2802 | pcg0007_39 | TRUE | 3 |
| ncgl2802 | pcg0755 | FALSE | 3 |
| ncgl2802 | pcg1860 | TRUE | 3 |
| ncgl2802 | pcg3381 | FALSE | 3 |
| ncgl2802 | pcg3381 | FALSE | 3 |
| ncgl2802 | wt | FALSE | 3 |
| ncgl2816 | pcg0007_39 | TRUE | 1 |
| ncgl2816 | pcg0007_39 | TRUE | 3 |
| ncgl2828 | pcg0007_39 | TRUE | 3 |
| ncgl2828 | pcg3121 | FALSE | 3 |
| ncgl2828 | pcg3381 | FALSE | 3 |
| ncgl2846 | pcg1860 | TRUE | 3 |
| ncgl2846 | pcg3121 | FALSE | 3 |
| ncgl2871 | pcg0007_119 | FALSE | 3 |
| ncgl2871 | pcg0007_39 | TRUE | 3 |
| ncgl2871 | pcg0755 | FALSE | 3 |
| ncgl2871 | pcg2613 | FALSE | 3 |
| ncgl2871 | pcg3121 | FALSE | 3 |
| ncgl2871 | pcg3381 | FALSE | 3 |
| ncgl2877 | pcg0007_39 | TRUE | 3 |
| ncgl2877 | pcg3121 | FALSE | 3 |
| ncgl2877 | pcg3381 | FALSE | 3 |
| ncgl2884 | pcg0007_39 | TRUE | 3 |
| ncgl2884 | pcg3121 | FALSE | 3 |
| ncgl2884 | pcg3381 | FALSE | 3 |
| ncgl2892 | pcg0007_39 | TRUE | 3 |
| ncgl2892 | pcg3381 | FALSE | 3 |
| ncgl2898 | pcg0007_39 | FALSE | 2 |
| ncgl2898 | pcg0007_39 | FALSE | 2 |
| ncgl2898 | pcg1860 | FALSE | 2 |
| ncgl2898 | pcg3121 | TRUE | 2 |
| ncgl2898 | pcg3381 | FALSE | 2 |
| ncgl2901 | pcg0007_119 | FALSE | 4 |
| ncgl2901 | pcg0007_39 | TRUE | 4 |
| ncgl2901 | pcg0755 | FALSE | 4 |
| ncgl2901 | pcg1860 | FALSE | 4 |
| ncgl2901 | pcg3121 | FALSE | 4 |
| ncgl2901 | pcg3381 | FALSE | 4 |
| ncgl2901 | wt | FALSE | 4 |
| ncgl2908 | pcg0007_39 | TRUE | 2 |
| ncgl2908 | pcg1860 | FALSE | 2 |
| ncgl2908 | pcg3121 | FALSE | 2 |
| ncgl2921 | pcg0007_119 | FALSE | 3 |
| ncgl2921 | pcg0007_39 | TRUE | 3 |
| ncgl2921 | pcg3121 | FALSE | 3 |
| ncgl2921 | pcg3381 | FALSE | 3 |
| ncgl2921 | wt | FALSE | 3 |
| ncgl2931 | pcg0007_119 | FALSE | 4 |
| ncgl2931 | pcg0007_39 | TRUE | 4 |
| ncgl2931 | pcg1860 | FALSE | 4 |
| ncgl2931 | pcg2613 | FALSE | 4 |
| ncgl2931 | pcg3121 | FALSE | 4 |
| ncgl2931 | pcg3381 | FALSE | 4 |
| ncgl2931 | wt | FALSE | 4 |
| ncgl2941 | pcg0007_39 | FALSE | 3 |
| ncgl2941 | pcg1860 | TRUE | 3 |
| ncgl2941 | pcg3121 | FALSE | 3 |
| ncgl2941 | pcg3381 | FALSE | 3 |
| ncgl2950 | pcg0007_39 | TRUE | 3 |
| ncgl2950 | pcg1860 | FALSE | 3 |
| ncgl2950 | pcg3121 | FALSE | 3 |
| ncgl2953 | pcg0007_39 | TRUE | 3 |
| ncgl2953 | pcg3381 | FALSE | 3 |
| ncgl2961 | pcg0007_39 | TRUE | 3 |
| ncgl2961 | pcg0755 | FALSE | 3 |
| ncgl2961 | pcg3121 | FALSE | 3 |
| ncgl2961 | pcg3121 | FALSE | 3 |
| ncgl2961 | pcg3381 | FALSE | 3 |
| ncgl2961 | pcg3381 | FALSE | 3 |
| ncgl2961 | pcg3381 | FALSE | 3 |
| ncgl2977 | pcg0007_39 | TRUE | 3 |
| ncgl2977 | pcg3121 | FALSE | 3 |
| ncgl2977 | pcg3381 | FALSE | 3 |
| ncgl2982 | pcg0007_39 | TRUE | 3 |
| ncgl2986 | pcg0007_39 | TRUE | 3 |
| ncgl2986 | pcg1860 | TRUE | 3 |
| ncgl2986 | pcg3381 | FALSE | 3 |
| ncgl2989 | pcg0007_39 | TRUE | 3 |
| ncgl2989 | pcg3121 | FALSE | 3 |
| ncgl2989 | pcg3381 | FALSE | 3 |

### Example 5: Allocation of Genes in the C. glutamicum Genome into Various Shells for Systematic Genome-Wide Perturbation

### Identification of Genes:

[0256] Identified genes were separated into four shells (1-4) based on the relevance of their impact to lysine production.

[0257] For shells 1 and 2, the genes in the genome of C. glutamicum were annotated by homology to the sequence of type strain ATCC 13032. The function of each gene in shells 1 and 2 was determined by using the KEGG pathway database. For shell 3, the genes in the genome of C. glutamicum were annotated using the RAST server. The function of each gene in shell 3 was determined using natural language search terms in the annotated description of each gene. These search terms were strings taken from the name of the metabolic area of interest.

Allocation into Each Shell:

[0258] The identified genes were allocated into shell 1 if they were involved in the conversion of direct metabolic intermediates between the substrate glucose and the product lysine. This included the transport of glucose into the cell, the transport of lysine out of the cell, and the enzymes involved in the conversion of carbon originally contained in glucose into each intermediate that ultimately was converted to lysine.

[0259] The identified genes were allocated into shell 2 if they were identified as being part of nitrogen metabolism, the TCA cycle, or the RNA degradasome KEGG pathway map. These areas of metabolism were chosen based on their relatedness to lysine production: Lysine contains significant nitrogen as compared to biomass, the TCA cycle generates energy for synthesis of lysine and biomass, and the RNA degradasome controls protein expression which is important to maximize for sufficient production during industrial fermentation.

[0260] The identified genes were allocated into shell 3 if they were identified as being part of cellular membrane transport, transcription, peptidoglycan biosynthesis, fatty acid biosynthesis, and biotin metabolism. These areas of metabolism are related to the production of lysine in industrial fermentation, but less so than the areas identified in shell 2. Transport is important to increase the productivity of each cell; altering genes related to transcription allows for the systematic modification of genes throughout the cell; peptidoglycan and fatty acid synthesis are involved in cell wall biosynthesis, which is the end point of one of the intermediates of lysine; biotin is an important cofactor for enzymes that are in the lysine metabolic pathway.

[0261] The identified genes were allocated into shell 4 if they did not fall into any of shells 1-3.

[0262] All of the U.S. patents, U.S. patent application publications, U.S. patent applications, foreign patents, foreign patent applications and non-patent publications referred to in this specification are incorporated herein by reference, in their entirety to the extent not inconsistent with the present description.

[0263] From the foregoing it will be appreciated that, although specific embodiments described herein have been described herein for purposes of illustration, various modifications may be made without deviating from the spirit and scope described herein. Accordingly, the disclosure is not limited except as by the appended claims.

The application's sequence listing, which the Patent Office published only in electronic form, follows.

SEQUENCE LISTING (286 sequences)

SEQ ID NO: 1 - DNA, 97 bp, Corynebacterium glutamicum
  source: /note="Pcg0007_39"
tgccgtttctcgcgttgtgtgtggtactacgtggggacctaagcgtgtattatggaaacgtctgtatcggataagtagcgaggagtgttcgttaaaa

SEQ ID NO: 2 - DNA, 93 bp, Corynebacterium glutamicum
  source: /note="Pcg1860"
cttagctttgacctgcacaaatagttgcaaattgtcccacatacacataaagtagcttgcgtatttaaaattatgaacctaaggggtttagca

SEQ ID NO: 3 - DNA, 97 bp, Corynebacterium glutamicum
  source: /note="Pcg0007"
tgccgtttctcgcgttgtgtgtggtactacgtggggacctaagcgtgtaagatggaaacgtctgtatcggataagtagcgaggagtgttcgttaaaa

SEQ ID NO: 4 - DNA, 98 bp, Corynebacterium glutamicum
  source: /note="Pcg0755"
aataaatttataccacacagtctattgcaatagaccaagctgttcagtagggtgcatgggagaagaatttcctaataaaaactcttaaggacctccaa

SEQ ID NO: 5 - DNA, 97 bp, Corynebacterium glutamicum
  source: /note="Pcg0007_265"
tgccgtttctcgcgttgtgtgtggtactacgtggggacctaagcgtgtacgctggaaacgtctgtatcggataagtagcgaggagtgttcgttaaaa

SEQ ID NO: 6 - DNA, 86 bp, Corynebacterium glutamicum
  source: /note="Pcg3381"
cgccggataaatgaattgattattttaggctcccagggattaagtctagggtggaatgcagaaatatttcctacggaaggtccgtt

SEQ ID NO: 7 - DNA, 97 bp, Corynebacterium glutamicum
  source: /note="Pcg0007_119"
tgccgtttctcgcgttgtgtgtggtactacgtggggacctaagcgtgttgcatggaaacgtctgtatcggataagtagcgaggagtgttcgttaaaa

SEQ ID NO: 8 - DNA, 87 bp, Corynebacterium glutamicum
  source: /note="Pcg3121"
gtggctaaaacttttggaaacttaagttacctttaatcggaaacttattgaattcgggtgaggcaactgcaactctggacttaaagc

SEQ ID NO: 9 - DNA, 1074 bp, Corynebacterium glutamicum
  source: /note="ncgl0009"
gtgttcatgcttgcacagcgaacactccccattcacatcaccgccccccacctgcccgtcgcgcgcgtatttcaccaaattcgcgccacagacgccgatcgcacctcgctgcaacgcgatcttgaactctcccaagctggcatcactcggcatgtatcagcgcttattgatgcaggtctcgtggaggaaacccgagtggattccggggcgcgctcggggcgaccgcgcacaaaattaggcatcgacggccgccatctcaccgcctggggagtgcacattggcctgcgcagcacggattttgcggtgtgcgatttagccggccgagtgattaggtatgagcgcgtggaccatgaagtttcacactccacgccgtcggaaacgctgaattttgtcgcacataggttacaaacattgagcgccggcttgcccgagccccgcaatgtgggcgtggcattatctgcccacttaagcgccaacggcaccgtcacttccgaagattatggctggtcagaggtggaaattgggatacacctccccttccccgccaccatcggatcaggtgttgcggcgatggccggttcggaaattatcaacgcgccactgacccaatccacgcagtccacgctgtatttctacgcccgcgaaatggtctcccacgcctggattttcaacggcgctgtccaccgccccaacagcggccgcacgccgacggcgttcggaaatacaaataccttaaaagatgcttttcgacgtggactcacaccaacaactttctccgatttagtccaactctcccacaccaacccgcttgcccgacagatcctcaacgagcgcgcccacaaacttgccgacgccgtaaccaccgccgttgatgttgtcgaccccgaagccgtcgtcttcgccggcgaagccttcaccctggatccggaaactcttcgcattgtggtgacccagctccgagcaaacaccggcagccaactgagaatccaacgcgcagacgcccacattctccgcaccgcggccatccaggtggcgctgcatccgatccgtcaagatccgttagcatttgtgtaa

SEQ ID NO: 10 - DNA, 372 bp, Corynebacterium glutamicum
  source: /note="ncgl0019"
atgagcatcgagccaggaatccccacgcttggaccgcttgaagaacaagtcatgcacattctgtgggatcacggaaaattgacagtccgtgaagtcatcgaattccttccaggtgatcctgcgtacacaacgatcgcaaccgtcctgcgtcacttgggcagaaaaggcatggtcaccattgtgaaagatggtcggactgctcgacacagcgcgttgatgaacagggaagaatacaccgctggcgtcatggatcaggtgctgtcgaccagtcgggatcgcaccgcatcaattctgcatttcgtggatacgatcacggcgactgatcgcgagctgcttctggagtatctgcaacagcaggagggcaggaaatga

SEQ ID NO: 11 - DNA, 594 bp, Corynebacterium glutamicum
  source: /note="ncgl0054"
atgacttccgctcaaccgattacttccgtagatgcacagactctaaaatcgtggatcgataagcatgaaggactcaccgtcattgacgtccgcactgcacatgagttttcaaatttgcacattaaaggctcttacaacgtgcctctgacttcacttgctgagcattccgaagagatcgcctcccgcgttggagagcatgttgttttggtatgtcagtcaggcattcgagcaggtcaggcacaacaaaagctggcacctttgggaatttccaccgtggctgttttggagggtggcatcaatagttttgctaaggctgacggtgatgtggtccgcggaacccaggtgtgggatatcgaacgccaggtgcgtttcgccgctggatctttggtatttgcgggacttgtgggaggtaaattcctttcaccaaaagttcgcaccttgtcgggaattattggtgcgggtctgacattttctggcgtttccaacacctgcgccatgggcaaagctctgtctgccttgccgtggaataaaactaagccagttcctaccgaaaccgagacattgagcaagcttccaagccctaaggagaactaa

SEQ ID NO: 12 - DNA, 516 bp, Corynebacterium glutamicum
  source: /note="ncgl0082"
atgactcaagatgaacacccccgacaggccgactcccatttcaacatgcttttaccggatggaaatgaaaacgcacaccagctttctgtcgctctaaatcaggtggcacatctgttggcctatgatgcggactcttcaattcatcgacctgatgggctaagtctggcgtcctatagaattctcttttcactgtggactgatggcccgatgagtccactccaggtggctgacaagactggaatgaaaaagtctgcgatttctaacctgttaaagccattgctcgctgaatctctgattgtgcaggtgacggcagaaaatgatcgacgctcaaaggttttaagccttagcgaaaaaggcactacatacattcagaaaacagccacccgccaaaatgctttggaatccgagtggtttggcaccctgaccgacatcgagcaggatttattggagtcgttgctcaggaaactgctcgactccaaccgcgcatccaaggttcgtaaaaaccgatctaactag

SEQ ID NO: 13 - DNA, 402 bp, Corynebacterium glutamicum
  source: /note="ncgl0142"
gtggatctcaatgctctttttgagatctttacgttggtagttttccaagtgggtgtcacctggcatgctgtgctgtccaaacgggaagggttccgtcaagcattcgcccaattcgatgttgcaaaagtagccgccttcaatgaggacgacgtggaacgcctacttgatgatctacagatttttagaaaccgaagaaaaatcaacgctgccatcaccaatgccaaagcgttgctggagttaaacgatgaaacaggcacctttgactcaattattgccgaccactcaactgacgccacagtcatggtgaagcagctcaaagctttaggttttacccatatcggactgacctccttgagcatcctccagcaggccattggggtcacagagccgaaggctgcctaa

SEQ ID NO: 14 - DNA, 1023 bp, Corynebacterium glutamicum
  source: /note="ncgl0223"
gtgactaccaaagacatttcccgcccagtatgcatcctgggcctcggcctcatcggcggatccctcctccgcgacctccatgcagccaaccactccgtcttcggctacaaccgctcacgctccggcgctaaatcagccgtcgacgaaggcttcgacgtttccgccgatcttgaagcaaccctccagcgtgcagccgccgaagatgcgctcatcgtcctcgcggtccccatgaccgcaatcgattcgcttctcgacgccatccacacccacgcaccaaacaacggcttcaccgacgtcgtatccgtaaaaaccgccgtctacgatgcagtaaaagcccgcaacatgcaacaccgctatgtgggatcccaccccatggcaggcaccgccaactccggctggagcgcatccatggacggactgttcaaacgagcagtatgggtggtcaccttcgaccagcttttcgacggcaccgacatcaactccacctggatcagcatctggaaagacgtcgtccaaatggcactcgccgtgggcgctgaagttgtcccatcccgagttggcccacacgatgcagcagcagcacgagtgtctcatttaacacacatcctggctgaaaccctcgccatcgtcggtgacaacggtggcgcactgtctctctctttggccgctggcagctaccgcgactccacccgcgttgcaggcaccgacccaggactcgtccgcgccatgtgtgaaagcaatgccggcccactggtcaaagccctcgacgaagcactggcgatcctccacgaagcccgcgaaggcctcaccgcagaacagccaaacatcgagcaacttgccgacaacggctatcgatcccgcatccgctacgaagcccgctccggccagcgacgcgccaaagaatccgttagccctaccatcacctcatccaggccagtgctccgtctccacccgggcacaccaaactgggagaagcagctcatccacgctgaaaccctcggcgcacggatcgaagtgttctag

SEQ ID NO: 15 - DNA, 657 bp, Corynebacterium glutamicum
  source: /note="ncgl0241"
gtgtttgaaggcccactccaggatctcatcgacgaactttctcgtctccccggcgtcggccccaaaagtgcccaacgcatcgcatttcacctgctcaacgtagatcctaccgatatcacccgccttcaggaagccctcggcggcgtgcgcgatggtgtccaattctgccgcatctgctgcaacatttcccgcgaagaagtctgccgcatctgctccgattctggacgcgacggcggaacaatctgtgtcgtcgaagaaccaaaagacatccaagttatcgagcgcaccggcgaattctccggccgctaccacgtcctcggcggcgccctcgacccgctggccaacatcggcccccgcgaactcaacatttccacgctcctgcagcgcatcggcggcgtcctgccagaccgcgagctcgcggattccactcctgaaaataagcttttcgacgccacccccaccgtccgcgaagtcatcctcgcaacggaccccaacaccgaaggcgaagccaccgcctcatacctcggccgcctcctcaaagacttcccagatctggtaatttcccgcctcgcatccggaatgccactaggcggcgacctcgaattcgtcgacgaactcactctctcccgagcattgagcggccgcctgcagatctag

SEQ ID NO: 16 - DNA, 753 bp, Corynebacterium glutamicum
  source: /note="ncgl0242"
atgaccaccctcaacatcggcctcatcctccccgacgtactcggaacttacggcgacgacggcaacgcactagtcctgcgccaacgcgcacgcatgcgtggcattaatgctgaaatccagcgcgtcaccctcgacgacgccgtcccctccaacctcgacctctactgcctcggcggcggcgaagacaccgcacagatccttgccaccgaacacctcaccaaagacggcggcctccaaaccgcagccgccgcaggccgccccatcttcgcagtctgcgcaggtctccaggtactcggcgactccttccgcgccgccggccgcgtcatcgacggccttgggcttatcgacgccaccaccgtctctttacaaaaacgagccatcggagaagtcgaaacgacaccaacccgcgccggattcaccgccgagctgaccgaacgactcaccggctttgaaaaccacatgggtgccaccctgttgggtcccgacgccgaaccacttggacgagtcgtccgcggtgaaggcaacaccgatgtctgggcagcctccgaaaacaccgatgaccaacgccaacaattcgccgaaggcgccgtccaaggcagcatcatcgccacctacatgcacggccccgcactcgctcgaaacccccaactcgccgacctcatgctcgcaaaagcaatgggtgtcgcactaaaggatctggagcctttggacatcgacgtcatcgaccgcctccgcgccgaacgcctggcctag

SEQ ID NO: 17 - DNA, 3006 bp, Corynebacterium glutamicum
  source: /note="ncgl0304"
gtggcagataccgcaggcaccacaggatcgaaaaagaagtacttggtgatcgtcgagtcggcgaccaaggctaaaaagattcagccttaccttggcaacgactacatcgtcgaggcctccgttggtcatattcgtgatctgccacgtggtgctgctgacatccctgcaaagtacaagaaggagccttgggctcgtcttggtgtggacaccgatcgcggtttcgcgccgctttatgtggtgagccccgataaaaagaagaaggtcgctgacctcaaggcgaagctcaagctcgttgatgagttgctgctggcaacagaccccgaccgtgagggcgaggcaattgcgtggcatttgcttgaggtgttgaagccgactgttccggtgcgtcgcatggtgttcaatgagatcacgaagcctgccattttggctgcggcggaaaacactcgtgagctggatgagaacctggtggatgcgcaggaaactcgtcgtattctggaccgtttgtacggctatgaagtctctcctgtgctgtggaaaaaggtcatgccgaggttgtcggcgggccgtgtgcagtcggtggcaactcgtgtgattgttgagcgggagcgcgagcgcatggcgttcgtgtcggcggattattgggatctgtcggcggagtttaatgcgggtgaaaacggcaaggcggattcggataacccgtcgtcgtttactgcgcgtttgtccacgattgatggaaaccgtgttgctcaaggccgtgattttaatgatcggggagagctgacctcggaggctgtcgtcgtcgataagcagcgtgctgaggcgttagccgaggctttggaaggccaggaaatggccgtcgttggggtcgaggaaaagccgtacacccgtcgcccttatgcgccgtttatgacctctacgctgcagcaagagtctggtcgcaagctgcattacacttctgagcgcacgatgcgtattgcgcagcgcttgtatgaaaacggccatatcacttatatgcgtactgactcgacctcgttgtcggagcagggcatgaaggctgcgcgcgatcaggcattggagctgtacggcgcggaatatgtttcgccgagcccacgtacctatgaccgcaaggtgaagaactcccaggaggcccacgaggcgattcgcccagctggtgaggcttttgcgaccccgggccagctgcatggccagttggatgcggaagaatttaagctctacgagctgatttggcagcgcaccgtggcgtcccaaatggctgatgccaagggtacgtcaatgaaggtcaccatcggtggcaccgcgaagaccggcgagaagactgagttcaacgcgaccggccgcacgctgactttccctggcttcctgcgcgcttatgtggaaaccacccgcaccgccgatggccgcgacgtagctgacaacgccgaaaagcgtctgccactgctgtctgagggcgatctgctcaaggttttgggcatcgaagccgatgggcacagcaccaatccacctgcgcgctacacagaggcgtcgttggtgaagaagatggaagatctgggcatcggccgtccttccacttatgcatcgatcattaagacgattcaggatcgcggctacgtttactcgcgcggcaatgcgctggtgccgtcctgggtcgcgttcgccgtggtcggattgcttgaagccaacttcacctcgctggtggattacgatttcacctcctccatggaagacgagctggacaacatcgccgcaggtcgcgagggtcgcacggagtggctcaacggcttctacttcggcgatgccgaagcggaccagtccatggctgaatcagttgcccgccagggcggtttgaaggcgcttgtcgacgcgaacctggagcacatcgacgcgcgttcagtaaactcactcaagcttttcgacgatgccgaaggccgtgccgtgaacgttcgagtcggacgctacggtccgtacatcgagcgcatcgtgggcaccaccgcgaaaggcgagccagaatttcagcgcgccaacctacctgaggaaaccacgcctgatgagctgaccctcgaggtcgctgagaagctttttgctaccccacaaggtggacgtgaactgggcattaacccagcaaacggtcgcatggtggtggctaaggaaggccgctttggtccatacgtgatcgagcaggtcactgactcagagcgtgctggcgccgaagcccaagcagaagaagtcgttgcagcggaacgaaaagctgaagacgaacagcgcgccgccgacggaatgcgacccaagaactgggaaaccaagactgccgcaaaccagaaggaaaagcgcatcaaccagctggttgaggaaaacctcaagccagcgaccgcgtccttgttcagcggcatggaacctgcaaccgtgaccctggaagaagccctcaagctgctgtccctgccacgcgaagtaggtgtcgatccttccgacaacgaagtgatcaccgctcaaaacggacgctacggcccttatctgaagaagggtagcgactcccgttccctcaacagcgaagagcagatcttcaccgtcactttggatgaggctcgccgcatctacgccgaaccaaagcgtcgtggacgcgccgctgctcagccaccactgaagcaacttggcgacaatgacgtttccggcaaaccaatgaccgtcaaggacggacgcttcggcccatacgtcaccgacggcaccaccaacgcgtcactgcgcaagggcgatgttccagagtccctgaccgatgcgcgtgccaacgagttgctttccgagcgtcgtgccaaggaagcagcagatggcggagctcctgcgaagaagacgtccactaaaaagactgcagccaagaagaccacggctaaaaagacaacagctaagaaaaccactgctaagaaaaccgtgaggaaggctccgccgaaaaccaccaaaaacgtggtgaaggccggcgctaagaagaagtcctaa

SEQ ID NO: 18 - DNA, 1461 bp, Corynebacterium glutamicum
  source: /note="ncgl0306"
gtgctcggcacgaatgtgtttggtgcgctcgcagtaatgctgtttgtgcgcttcctcattccgcagccagatgcttcaaatttcaacgctgagatctcgtatctgccagctgttggtttcgcatacttggcgttcgccattgtcgcgggcatgctggtgacatttttgatgttccgcccggtgcttgattggcagcgaagccctgaagatcatgaccgaaatatggtgcgcaacttggttatgcgcatccccatctaccaggcaattctgtgcgcagtggtgtggttaatcggcattgcaattgcaacgttgatttcggccagtgtgtctaccagtttggcgctggtcgtggcgttttccacgttgatggctgccgcaatcgtcgtgctgctcacctaccttgaggctgagcgtttggtgcgtccggttgctgcgtctgccctggcgcgtcgatttgaggattccacgctggaaccacctgtgagccagcgcttgcgtatgacgtggttgctgacgttgggcattccagtgatgggaattctgctgcttatttggggctactcgcagggcattttcggctctgatgcctccggaattatgcctgccatcgcagcgctcgcgtttgcatcgttggtcacgggttacctgggcaaccggcttgtggtgtcctctgtggtggatccgattcgggagctccaggaggccatcaatagggtgcgtcgtggtgaaaacgatgtgcaggttgatatttatgatggctctgagatcggtgtgcttcaggctggcttcaatgagatgatgcgtggcctgcgtgaacgtcagcgcgtccgtgaccttttcggtcgctacgtgggcgctgaagtggccaagcgcgcgctggaggaacgccccactctgggtggcgaggaccgtaaggttgccgtgctgtttgtcgatgtcatcggctccaccacctttgccgtcaaccacactcctgaagaggttgtggaggcgctcaatgacttcttcgagcacgtcgtggaggttgtgcaccgcaacaagggtgttatcaacaagttccagggtgacgcggcgttggcgattttcggcgctcccctgcccctgtctgatgccaccggtcatgcgcttgcggctgcccgtgagctccgcgcagagctgaaagatctccagctcaaggccggaattggtgtggctgctggccatgtcgttgctggtcatatcggcggtcacgcgaggtttgagtacactgtgatcggcgacgcggtgaaccaggctgcgcgcctgacggagatcgcgaaaacgaccccaggccgcaccgtcaccaacgcttccacgctgcgtgaggccaacgaggcggagcaggctcgctggacgctcatgaagtccgtggagctgcgcggacgcggccagatgacgcagattgcgcggcctattcggccgacgttggcggacaggtcctaa

SEQ ID NO: 19 - DNA, 879 bp, Corynebacterium glutamicum
  source: /note="ncgl0356"
gtggtaccagctgccggaatggggacacgattccttcctgcaacgaagacaatcccaaaagagcttcttcctgtggtcgacaccccaggtattgagctagttgctaaagaagcagctgatcttggtgcaactcgattggcaatcattactgcgccgaacaaagacgaaatcctaaaacactttgaggagttccctgagctcgaggcaaccctcgaggcccgcggtaagattgatcaactgaataaagtccgagcagctcgagaattgattgccacggtgcctgtggttcaagaaaagcctcttggccttggacatgcggtgggcttagcagaggcagtgctggatgaggacgaagatgttgtggcagtcatgctgccggatgatctggtattgccttttggtgtgaccgagagaatggcagaagttcgcgctaagtttggcggatctgttcttgcggcaattgaagtggctgaagatgaagtctctaattacggagtatttgagctaggcgaactcgatgcagagtctgaaagtgaaggcattagacgtgttgtaggaatggttgaaaagcctgcgcctgaggatgccccatcaaggtttgccgcaacgggccgttatctacttgatcgagctatttttgatgcactgcgtcgaattgagcctggtgctggcggagaacttcaactaactgatgccattgcactgttgattgaagaaggccatccggtacacatcgtggttcatgaaggaaagcgccatgaccttggaaatccagctgggtatattcccgctgttgtgtacttcgggcttcgtcatgcagagtacggttccaagattcaccgtgcggtgaaggaagtactcgctgagtttgaatcttaa

SEQ ID NO: 20 - DNA, 822 bp, Corynebacterium glutamicum
  source: /note="ncgl0398"
gtgggaaccatgacaacaattgctgtaatcggcggcggacaaatcggcgaggctttagtctcaggtttgatcgcggccaacatgaatccacaaaatattcgcgtcaccaaccgttcggaagagcgcggccaagagctgcgtgaccgctacggtatcctcaacatgacggataattcccaagccgcagacgaagccgacgtggtgttcctgtgcgtgaagccgaaatttatcgtcgaagtgctctccgaaatcaccggcactctggataacaattccgcacaaagcgtcgtggtcagcatggccgcaggcatcagcatcgctgccatggaagaaagcgcctctgcggggctccccgtcgtgcgcgtcatgccgaacactccaatgctcgtaggcaagggcatgtcgactgtcaccaaaggccgctacgtcgacgcggaacagttggaacaagtcaaggacctgttgagcaccgttggagacgtcctcgaagtcgcggaatcagacatcgacgcagtcaccgccatgtccggatcctcccctgcatacctgttccttgtgacagaagcgctcattgaggcaggagtgaacctaggcctgccccgcgctaccgctaaaaagctcgctgtggcctcattcgaaggtgctgcaaccatgatgaaggaaaccggcaaagaaccctcagaattgcgcgcaggcgtttcctcacccgcaggcaccaccgtcgcagccatccgagaactcgaagaaagcggaatccgaggcgctttctaccgcgcagcccaagcctgcgccgaccgatccgaagaactcggaaagcgctag

SEQ ID NO: 21 - DNA, 438 bp, Corynebacterium glutamicum
  source: /note="ncgl0408"
atgcctggaaaaattctcctcctcaacggcccaaacctgaacatgctgggcaaacgcgagcctgacatttacggacacgacaccttggaagacgtcgtcgcgctggcaaccgctgaggctgcgaagcacggccttgaggttgaggcgctgcagagcaatcacgaaggtgagctaatcgatgcgctgcacaacgctcgcggcacccacatcggttgcgtgattaaccccggcggcctgactcacacttcggtggcgcttttggatgctgtgaaggcgtctgagcttcctaccgttgaggtgcacatttccaatccgcatgcccgtgaagagttccgccaccattcttacatttccctcgccgcggtctccgttatcgctggcgctggcatccagggttaccgtttcgcggtcgatatcctggcaaatctccaaaagtag

SEQ ID NO: 22 - DNA, 624 bp, Corynebacterium glutamicum
  source: /note="ncgl0424"
gtgcgtttgaccaaactagcagcaacaatcggctgcgttacactcagcggactagcgctagtagcctgcagcagtgacagtaccgctggtactgacgctgttgctgtcggcggaaccttccaattccactccccggatggaaagatggaaattttctacgacgaagctgaccgtcaacaactccccgacatcggtggagattccctcatggaagagggcacacagatcaacctgtctgattttgaaaaccaagttgtcatcctcaatgcgtgggggcagtggtgtgcaccgtgccgctccgaatccgatgatctccagattatccatgaggaactccaagctgccggaaacggcgacacccctggtggcaccgtgttgggtatcaatgtgcgtgattactcccgcgacatcgcccaagactttgtcaccgacaacggccttgattacccaagcatttacgatccaccatttatgacagcagcatcactcggtggtgttcccgcatcggtgatcccaaccaccatcgtgctggataaacagcaccgtcccgcagcagtgttcttgcgcgaagtcacctccaaagatgtgttggatgttgcgttgccattggtagatgaggcctaa

SEQ ID NO: 23 - DNA, 807 bp, Corynebacterium glutamicum
  source: /note="ncgl0425"
atgtctgagattgtggtagcccaaagcatcggccagcagtttgctgacgtcgcagcttccgggccactgttccttggcatccttgccgcagcgctcgcaggtctggtgtcttttgccagcccgtgtgttgtgccgttggtgccaggatatatttcctacctcgccggcgtggtcggtggggaagtggaatacagcgcgcagggcaccaaggtgaaaaccaagcgtttcgccgtgggtggcgcagccatactgttcatcctgggattcaccgtggtgttcgtgctggctacggtcagtgtgtttggtgccatcagcgtgctcaccctaaacgccgacaccctcatgcgtatcggcggcgtggtgaccatcatcatgggcatcgtgttcatgggcttcattccaggcctgcagcgcgatacccgcatggcaccaaagcgttggaccacctggttgggtgcgccccttcttggcggagtgttcgctctcggttggaccccttgtttgggccccaccctggctgcgatcatctccatttctgcaggtactgaaggtatgaccgctgcgcgtggcgtgatcttaattgtgggttactgcctcggactggggctgccgttcctgctgatcgcgttgggctccagcaaggcactcaccggagtcgagtggttgcgcaagcattcccgcaccctgcaaattatcggcggtgtgtttttgatcttggtcggagtagcgttgctctctggctcatgggcaatttttatcaactgggtccgtcagtggaccgttgaatacggcgcaacactgctctag

SEQ ID NO: 24 - DNA, 1014 bp, Corynebacterium glutamicum
  source: /note="ncgl0427"
atgttgcccgtcaatcaaacgtatgcgcagttctcagatactgccttcgtatcggcatacatcatctacgttctggcactcatcctctccctcgtctactacgttaaacaacaaggcattatcgacgcccgccgcgagcaaacccgcgtccgcgaactagtcggtgcaggcggcagcgctgatagtgtcgcagatcttcctgatgacatcgccgatggtgtcctcgccgacgaggatcttgcaaaacgcgaagaaaccgcacgcaaactagccaacatgacccaatccctcatgtggctcggtgtcatggtgcacctcgtttccgtcgtgatgcgcggactctctgccagccgattccccttcggcaacctgtatgaatacatcctcatggtcacactctttgccattatcggagccgtgctcatcctgcagcgcccacaattccgagtcgtatggccttggatccttactccaatgctggcactgctcttctacggcggcacccagctgtactcggatgcagcaccagtcgtgccagcactgcagtccttctggttcccgatccacgtttcctctgtatccatcggtgcatccatcggtatcgtctctggcattgcatctctgctgtatctgctgcgcatgtggcaaccaaagggtaaagaaaagggcttcttcggcgcagtggcaaaaccactcccatccggaaaaaccctggataacctggcatataagacggcgatctggactgtcccgatcttcggcctgggcgtcatcttgggtgccatttgggcagaagcagcgtggggtcgtttctggggatgggatcctaaggaaacagtctccttcatcacctgggttctctacgctggttacctccacgcacgtgcaactgctggttggcgcaacaccaacgctgcatggatcaacatcctggcgctggtcacgatgatttttaatctgttcttcatcaacatggtcgtatctggtctgcactcttacgccggactgaactaa

SEQ ID NO: 25 - DNA, 885 bp, Corynebacterium glutamicum
  source: /note="ncgl0439"
ttgttgttcactcttgaacagttgcggtgttttgtcgccgtcgccaatcatcttcatttcggaaaagctgctgcagaactatccatgacgcagccgccgttgagtcgtcagattcaaaagctggagaagatcgtcggtgcaaccctgcttgatcgtgacaaccgcaaggtggaactgaccactgcgggtttcgcatttttgaaggatgctcgcctcattctcaattccaccgagaaggcggctgagcgcgcacgattggctagctctggcatgtggggacagctcaatattggatacaccgctgcagcgggtttttccattctgggcccgacgttgaatcagttgcatgagaagatgccgggggtcagtgtcgatctttttgagatggtctccaccgagcagatcgctgccttggaatctgggctgttggatcttggcattggccgattgagctctcctgtggagggtcttcaaactcgacgtctccaggcagattccttggttcttgcagctccgaaggggcatccacttcttgatcaggatcgaccactgttgcggaagcatctgactggggttccttttctgcagcactctcccaccaaggcgaagtacctctacgacatcgttgttagaaacttcacgatcaatgatgcgcaggtgcaacatacgctgagccagatcaccacgatggttagtctggtggcctctggactgggtgttgcgctggttccggagtccgcgaaaaaactcaattacagcggtgttgagtatcgccatttttatgatctacctgttggtttagcggagctgcaggctatttattccacctcgaatgataatcctgcggtgcggaaattcatcaagaacattgacgataccttttaa

SEQ ID NO: 26 - DNA, 972 bp, Corynebacterium glutamicum
  source: /note="ncgl0458"
atgagcgatgagaacaacaacgagtttgagctggacgaggatcttaacttcagcgcgagctttagtgatgaattcgcagatgacgatttcgatgaagaagcagacgtagacgctgacgctgacgctgctgcagaggccactgcgctggaagctgagcaggatctggaagatgagaccctgaacgctccagaagtcgcagatgaagtcgcagaagaagctcctgctgctgaagaggccgaagccccagcagaagaggacgaagaggctgacagccttgctcaggctgctgctgcacttggtgacaccgatgagcaggacgcggatgcggagtacaaggctcgtctgcgtaagttcactcgtgagctgaagaagcagcctggtgtttggtacatcattcagtgctactccggctacgagaacaaggtgaaggcgaaccttgacatgcgtgctcagacccttgaggttgaggatgacatctttgaggttgttgttcctatcgagcaggtcactgagatccgtgatggtaagcgcaagctggttaagcgtaagttgctgccgggctacgttttggtccgcatggacatgaatgaccgcgtgtggtctgttgttcgcgatacccctggtgtgaccagctttgtgggtaacgagggcaatgcaactcctgtgaagcaccgcgatgttgcgaagttcttgatgcctcaggagcaggctgttgccaccggtgaggctgctgctgcggctgccgagggtgagcaggttgtggcaatgccaaccgatactaagaagcctcaggttgctgtggacttcactgttggtgaggctgtgaccattctgactggtgctttcgcttctgtttctgcaacgatttcttctatcgatcctgagctgcagaagctggaagttttggtgtccatctttggtcgtgaaactcctgttgatctcagcttcgaccaggttgagaaggttagctag

SEQ ID NO: 27 - DNA, 3480 bp, Corynebacterium glutamicum
  source: /note="ncgl0471"
ttggcagtctcccgccagaccaagtcagtcgtcgatattcccggtgcaccgcagcgttattctttcgcgaaggtgtccgcacccattgaggtgcccgggctactagatcttcaactggattcttactcctggctgattggtacgcctgagtggcgtgctcgtcagaaggaagaattcggcgagggagcccgcgtaaccagcggccttgagaacattctcgaggagctctccccaatccaggattactctggaaacatgtccctgagcctttcggagccacgcttcgaagacgtcaagaacaccattgacgaggcgaaagaaaaggacatcaactacgcggcgccactgtatgtgaccgcggagttcgtcaacaacaccaccggtgaaatcaagtctcagactgtcttcatcggcgatttcccaatgatgacaaacaagggaacgttcatcatcaacggaaccgaacgcgttgtggtcagccagctcgtccgctccccgggcgtgtactttgaccagaccatcgacaagtcaactgagcgtccactgcacgccgtgaaggttattccttcccgcggtgcttggcttgagtttgacgtcgataagcgcgattcggttggtgttcgtattgaccgcaagcgtcgccagccagtcaccgtactgctgaaggctcttggctggaccactgagcagatcaccgagcgtttcggtttctctgaaatcatgatgtccaccctcgagtccgatggtgtagcaaacaccgatgaggcattgctggagatctaccgcaagcagcgtccaggcgagcagcctacccgcgaccttgcgcagtccctcctggacaacagcttcttccgtgcaaagcgctacgacctggctcgcgttggtcgttacaagatcaaccgcaagctcggccttggtggcgaccacgatggtttgatgactcttactgaagaggacatcgcaaccaccatcgagtacctggtgcgtctgcacgcaggtgagcgcgtcatgacttctccaaatggtgaagagatcccagtcgagaccgatgacatcgaccactttggtaaccgtcgtctgcgtaccgttggcgaactgatccagaaccaggtccgtgtcggcctgtcccgcatggagcgcgttgttcgtgagcgtatgaccacccaggatgcggagtccattactcctacttccttgatcaacgttcgtcctgtctctgcagctatccgtgagttcttcggaacttcccagctgtctcagttcatggaccagaacaactccctgtctggtttgactcacaagcgtcgtctgtcggctctgggcccgggtggtctgtcccgtgagcgcgccggcatcgaggttcgagacgttcacccatctcactacggccgtatgtgcccaattgagactccggaaggtccaaacattggtctgatcggttccttggtttcctatgctcgagtgaacccattcggtttcattgagaccccataccgtcgcatcatcgacggcaagctgaccgaccagattgactaccttaccgctgatgaggaagaccgcttcgttgttgcgcaggcaaacacgcactacgacgaagagggcaacatcaccgatgagaccgtcactgttcgtctgaaggacggcgacatcgccatggttggccgcaacgcggttgattacatggacgtttcccctcgtcagatggtttctgttggtaccgcgatgattccattcctggagcacgacgatgctaaccgtgcactgatgggcgcgaacatgcagaagcaggctgtgccactgattcgtgccgaggctcctttcgtgggcaccggtatggagcagcgcgcagcatacgacgccggcgacctggttattaccccagtcgcaggtgttgtggaaaacgtttcagctgacttcatcaccatcatggctgatgacggcaagcgcgaaacctacctgctgcgtaagttccagcgcaccaaccagggcaccagctacaaccagaagcctttggttaacttgggcgagcgcgttgaagctggccaggttattgctgatggtccaggtaccttcaatggtgaaatgtcccttggccgtaaccttctggttgcgttcatgccttgggaaggccacaactacgaggatgcgatcatcctcaaccagaacatcgttgagcaggacatcttgacctcgatccacatcgaggagcacgagatcgatgcccgcgacactaagcttggcgccgaagaaatcacccgcgacattcctaatgtgtctgaagaagtcctcaaggacctcgacgaccgcggtattgtccgcatcggtgctgatgttcgtgacggcgacatcctggtcggtaaggtcacccctaagggcgagaccgagctcaccccggaagagcgcttgctgcgcgcaatcttcggtgagaaggcccgcgaagttcgcgatacctccatgaaggtgcctcacggtgagaccggcaaggtcatcggcgtgcgtcacttcttccgcgaggacgacgacgatctggctcctggcgtcaacgagatgatccgtatctacgttgctcagaagcgtaagatccaggacggcgataagctcgctggccgccacggtaacaagggtgttgtcggtaagattctgcctcaggaagatatgccattccttccagacggcactcctgttgacatcatcttgaacacccacggtgttccacgtcgtatgaacattggtcaggttcttgagacccaccttggctggctggcatctgctggttggtccgtggatcctgaaaatcctgagaacgctgagctcgtcaagactctgcctgcagacctcctcgaggttcctgctggttccttaactgcaactcctgtgttcgacggtgcgtcaaacgaagagctcgcaggcctgctcgctaattcacgtccaaaccgcgacggcgacgtcatggttaacgcggatggtaaagcaacgcttatcgacggccgctccggtgagccttacccgtacccggtttccatcggctacatgtacatgctgaagctgcaccacctcgttgacgagaagatccacgcacgttccactggtccttactccatgattacccagcagccactgggtggtaaagcacagttcggtggacagcgtttcggcgaaatggaggtgtgggcaatgcaggcatacggcgctgcctacacacttcaggagctgctgaccatcaagtctgatgacgtggttggccgtgtcaaggtctacgaagcaattgtgaagggcgagaacatcccggatccaggtattcctgagtccttcaaggttctcctcaaggagcttcagtccttgtgcctgaacgtggaggttctctccgcagacggcactccaatggagctcgcgggtgacgacgacgacttcgatcaggcaggcgcctcacttggcatcaacctgtcccgtgacgagcgttccgacgccgacaccgcatag

SEQ ID NO: 28 - DNA, 807 bp, Corynebacterium glutamicum
  source: /note="ncgl0531"
atggcgggaggaaatcgcgaacctggacgcacagtcacctccaaggtgatcgccgtactgggagcttttgaacacaccatgcgtccacttggtgtcactgaaatcgctgagctggcagacctcccaccaagtactacccaccgtctcgtttctgaattaaccgaaggcggactactcagcaagaaatctgatgggcgctaccaattgggcttacgtatctgggaactcgcccaaaatacaggacggcagttacgcgacactgcacgcccgttcatccaagagctctactcacttacttccgagactgcgcagctagtggtccgcgataaagatgaagcacttttgattgaccgagcctacggcacgaagaaaattccacgctcggctcgagtcggtggtcgactacctctgaactccactgcggttggcaagattctccttgcgtttgatgagccatgggtaaaacagtcctatctcaagctgccactcaacgcctccaccccaaagacaattgtgaatcccgacgtcttggctgcgcagctgaaacaaattcactcgcaaggctttgccatcacacatgacgagcaacgaatcggcggcgcatcgatcgccgtaccggtctggcatacaggaaaactgggagcagcactggggttggtggttcccaccgcacaggctgcaaatcttgagcgctatctcccgatccttcaggcgacaagtcagaggattacaaaagcaaccgcgctcattcctttggacacacttttggcttcacacaaaaatgcagaacgaaaaagcgatacctaa

SEQ ID NO: 29 - DNA, 1260 bp, Corynebacterium glutamicum
  source: /note="ncgl0546"
atggctgaaggcatgttgatgcccacgacatcggcgcaggtgtcggggcataaatttctggtgcggcgcatcgaacatgggttggtgatgggcgatgtgcgcatgattcatgatccacttggtaggcgccggcgggcgttggtgtttggggtggtggcgtgcgtgatgttggcggtgggatcattggcgttggctatttttcgacccgcgaaggatccggccgatgcgccgttgatccgtgctgaatccggtgcgctctttgtgcagctggatggggcagtgcatccggtggctaatgtggcctcggctcggttgattgtgggggagccggtggatccggtgaacgccagcgatgcgatcatcgcgggcatgccgcgcggagtgccggtgggggtttctgatgcgccggggcttttcagcagcaccgaagaacccgagcaagattggtttgtgtgtcaggatgtcggcactggggatctacacattacggttcctagggacggactagggcccaccctgattgcggaaggaaatgggtggctgggggcgtcgaaaagcgaaaccggcgaggtcacctggaacctgattaccgcggacgggcgccgcgaactgccggcgtgggacagcgaacatgggcgcattatgcgccgccacctggggatttccgaggacaccccgcgcatttatctgaccactgagctgctcaacgcgatccccgagcacgacgcggtccgcttcccagacccgctgcccgagcttgtcgacgcctccacccgcaactggttacggctcgacggggcgctcgccgaaatcacgccgctacagcgcgggttgcttatcgacgccggttccggtgttttccccgaccccaccgcgcttcttggtgtgcatgaagaaacagccaacaccttgacgctgcccgagcaaacagtttcttggcaagatctggacggtggttttgcctgcgcggatggtgaaggccagatcggtttcctggaaactctggaatcgggggtggcgctatctggtgattccagggcgaaaagtttcagcacaaacgctggtggggcagtgggcgtggacagtggctttggctactatgtggtctctgattttgggctgatgcaccctgtttctactggtgaatcgatggttgccctaggaatcactgacgtgcaggtcgtgccgtggagcgtgctgcgattgttgccgcagggaagtgaattagcaaaagagacagcgctcgcgcccacctattaa

SEQ ID NO: 30 - DNA, 498 bp, Corynebacterium glutamicum
  source: /note="ncgl0564"
atgaaatctgagtttccggtatccggcacgaggcgttttgagcatgccgcagatacccaaaattttggggaagaattaggcaggcatctagaagctggcgatgtggtgattttggacggcccgctgggtgctggaaaaaccacatttactcaaggtatcgctcgtggattgcaggtgaaggggcgggtgacatcgccgacgtttgtgatcgcgagggaacaccgctcggaaatcggtgggccagatctgatccacatggatgcctaccgattgctgggcgaagacagcgaggatgctgatccgatcggtgcgctggactctttggatttggataccgatttggacttggctgtggttgttgcggaatggggcggtggcttggtggagcagatcgctgactcgtatcttttgattactattgatcgagagaccgctgtgcaggaagacccggaatctgaggctcgaattttccattgggaatggcgcgaaggccgctga

SEQ ID NO: 31 - DNA, 1617 bp, Corynebacterium glutamicum
  source: /note="ncgl0573"
atggcaaagctcattgcttttgaccaggacgcccgcgaaggcattctccggggcgttgacgctctggcaaacgctgtcaaggtaaccctcggcccacgcggccgtaacgtggttcttgataaggcattcggcggacctctggtcaccaacgacggtgtcaccattgcccgcgacatcgaccttgaggatccttttgagaacctcggtgcacagctggtgaagtccgttgctgttaagaccaacgatatcgctggcgacggcaccaccaccgcaactctgcttgctcaggcactcattgctgaaggcctacgcaacgttgctgctggcgcaaacccaatggagctcaacaagggtattgctgcagctgcagaaaagaccctggaagagctgaaggcacgcgcaaccgaggtgtctgacaccaaggaaatcgcaaacgtcgcaaccgtttcatcccgcgatgaagttgtcggcgaaattgttgctgcagcaatggagaaggttggcaaagacggtgtcgtcaccgtcgaggagtcccagtccatcgagactgctctcgaggtcaccgaaggtatttccttcgacaagggctacctttccccttacttcatcaacgacaacgacactcagcaggctgtcctggacaaccctgcagtgctgcttgttcgcaataagatttcttccctcccagacttcctcccactgttggagaaggttgtggagtccaaccgtcctttgctgatcatcgcagaagacgtcgagggcgagcctttgcagaccctggttgtgaactccatccgcaagaccatcaaggtcgttgcagtgaagtctccttacttcggtgaccgccgcaaggcgttcatggatgacctggctattgtcaccaaggcaactgtcgtggatccagaagtgggcatcaacctcaacgaagctggcgaagaagttttcggtaccgcacgccgcatcaccgtttccaaggacgaaaccatcatcgttgatggtgcaggttccgcagaagacgttgaagcacgtcgcggccagatccgtcgcgaaatcgccaacaccgattccacctgggatcgcgaaaaggcagaagagcgtttggctaagctctccggtggtattgctgtcatccgcgttggtgcagcaactgaaaccgaagtcaacgaccgcaagctgcgtgtcgaagatgccatcaacgctgctcgcgcagcagcacaagaaggcgttatcgctggtggcggttccgctttggttcagatcgctgagactctgaaggcttacgccgaagaattcgaaggcgaccagaaggtcggcgttcgcgcactggctactgctttgggcaagccagcgtactggatcgcctccaacgcaggccttgacggctctgttgttgttgcacgcactgctgctctgccaaacggcgagggcttcaacgctgcaactttggaatacggaaacctgatcaacgacggtgtcatcgacccagtcaaggtcacccattccgcagtagtgaatgcaacctctgttgcacgcatggttctgaccactgaggcttctgttgttgagaagcctgcagaagaagcagccgatgcacatgcaggacatcatcaccactaa

SEQ ID NO: 32 - DNA, 1521 bp, Corynebacterium glutamicum
  source: /note="ncgl0578"
atgacaacccagagccgagtttctaccggaggagacaacccaaacaaggttgccctcgttggattaacctttgatgacgtacttttgcttccagatgcgtcggacgttgttccttcagaggtagatacctcgacgcagttaacacgtaatattcgccttaacacccctattctttctgccgcaatggatactgtcaccgaggctcgcatggctatcggcatggcacgccatggcggcattggtgttttgcaccgcaacctgtctattcaagagcaggcagaaaacgttgagctggtgaagcgttccgagtctggaatggtcactgatcctgttacctgtactcctgacatgagcatccaagaagtggatgatctgtgtgcacgtttccgcatttccggtctgcctgttgttgatgaggccggaaagttggttggtatttgcaccaaccgcgatatgcgttttgaaagtgacatgaaccgtcgtgtcgctgaagttatgaccccaatgcctttggttgttgctgaagagggcgtcaccaaagagcaggctcttgctttgctgtctgcaaacaaggtggagaagcttcctatcatcgcaaaggacggcaagcttgtcggtctgatcacggtgaaggacttcgttaagactgagcagcacccgaacgcatccaaggatgcatcaggtcgtctgctggttgcggctggcatcggcacgggcgaggagtcattccagcgagctggtgcgcttgccgacgccggcgtcgacattttggtcgtagactctgcacatgcccatagccgtggagttttggacatggtgtcccgcgtgaagaagtcgttccccaaggtcgatatcgttggcggcaacttggcgacccgcgaggctgcgcaggccatgattgaagctggcgcagacgctatcaaggtgggtattggcccaggttctatttgcaccactcgcgttgtcgcaggtgtcggtgcacctcagatcactgcgatcatggaggcagctgttccagctcacaaggctggcgttcctatcatcgccgatggcggcatgcagttctctggtgatatcgctaaggctttggctgctggcgctaactccgtgatgctgggctccatgctggctggtaccgctgaggctcctggtgagaccatcaccatcaacggcaagcagtacaagcgttaccgcggcatgggctccatgggcgctatgcagggccgtggacttagtggtgagaagcgttcctactccaaggaccgttacttccagtctgacgttaagagcgaagacaagctcgttccagaaggcatcgaaggtcgcgtgcctttccgcggtcccatcggagacatcattcaccagcaggtcggtggacttcgtgcagcaatgggctacaccggttcctccaccattgaagagctgcacaacgctcgtttcgtgcagatcaccagcgcgggtctgaaggaatcccacccgcaccacatccagcagactgtggaagctcctaactatcactag

SEQ ID NO: 33 - DNA, 912 bp, Corynebacterium glutamicum
  source: /note="ncgl0581"
gtgctcaatctcaaccgcttacacatcctgcaggaattccaccgcctgggaacgattacagcagtggcggaatctatgaactacagtcgttctgcgatctcccaacaaatggcgctgctggaaaaagaaattggtgtgaaactctttgaaaaaagcggccgaaacctctacttcacagaacaaggcgaagtgttggcctcagaaacacatgcgatcatggcagcagtcgatcacgcccgcgcagccgtcctagattcgatgtctgaagtatccggaacgctgaaagtcacctccttccaatccctgctgttcacccttgccccgaaagccatcgcgcgcctgaccgagaaatacccacacctgcaagtagaaatctcccaactagaagtcaccgcagcgctcgaagaactccgcgcccgccgcgtcgacgtcgcactcggtgaggaataccccgtggaagttcccctcgttgatgccagcattcaccgcgaagtcctcttcgaagaccccatgctgctggtcaccccagaaagcggtccatactccggcctcaccctgccagaactccgcgacatccccatcgccatcgacccgcccgacctccccgcaggcgaatgggtccataggctctgccggcgcgccgggtttgagccccgcgtgacctttgaaaccagcgatcccatgctccaggcacacctcgtgcgcagcggtttggccgtgacattttcccccacactgctcaccccgatgctggaaggcgtgcacatccagccgctgcccggcaaccccacgcgcacgctctacaccgcggtcagggaagggcgccagaggcatccagccattaaagcttttcgacgaaccctcgcccatgtggccaaagaatcttatttggaggctcgtctagtagagtga

SEQ ID NO: 34 - DNA, 912 bp, Corynebacterium glutamicum
  source: /note="ncgl0598"
atgacacaccaaaattcgcctctctttcttaaaagtgcactgagactttacaatcgggcttcattcaaggcttcacataaagtgatcgaggaatattcaacgagcttcagtctgtctacgtggttgctatccccacgcatacgcaatgacatacgaaatctctatgcagtagttcgtatcgccgatgaaattgtcgacggcactgcacatgccgctggttgctcaactgccaaaatcgaagagattctcgatgcctatgaaattgcggttcttgcagcaccacaacaacgcttcaacacagatcttgttttacaagcttatggtgaaactgcccgacgctgtgatttcgaacaagagcatgtaatagccttctttgcatcaatgcgtaaggacctcaaagctaatacacacgacccagatagcttcacaacgtatgtctatggctccgcggaagttataggcctactttgtctcagcgttttcaaccaaggtagaacgattagcaaaaaacggctagagattatgcaaaacggagcccgctcattgggagcagcatttcagaaaattaactttctccgtgacttggcagaagatcagcaaaatttgggccgtttctatttccccgaaaccagccaaggaactcttactaaagaacaaaaagaagatctcatcgctgatattcgtcaagacctggcaattgcccacgatgcatttccagaaataccagtgcaggctcgcatcggagtgatctctgcctatttgctctttcaaaaactcactgaccgaattgaggctactcctacctccgatttattgcaggagcgagtcagagttccacttcatatcaaactctctatactcgctagcgccacgatgagaggtctatccatgagcatctacagaaagaattcg

SEQ ID NO: 35 - DNA, 2442 bp, Corynebacterium glutamicum
  source: /note="ncgl0600"
ttgcgacataactggccgtgcgatactcgaatggacaatggcatgacaatcaccacagagcattcaactcatcctgatcttgatttcaatgatgagatctatcgggaactaaatcgcatctgcgcttcgctatctcaacagtgcagcacatatccaccagagttccgtacatgcctagatgccgctttccaagctttgcggggtggcaagttaatccgtcctcggatgctattagggctatacggggcccgacccccggatagtagacacggaggatttgatcaggaagcagatttcaggatagcaggacagcgcttctcaaacaccgcaggggcgagatatttacaccaggaatgccggcgcaccatgttgtagcgggtacaccagcggaagacgtcccggcgacagcgcaactggttcatgaatgtcttggaatcctggaggacttcccgcttcagtgctgcgttgaaggactccgcgagggcattgtccgcactggtgccgattgatcccatcgactgccttatccccaggtctttacaggtgtcctggaatgcgtgagaagtgtaaacacttccgtgatccgagtgaaagatcgcccccgtcaggcttccgcgctggcccttagccatcagcagcgcgtcctgcaccagggaggtacgcatgtgatctgcgatagaaaagcccaccaacctgcgggaatagcagtcaatgaccgtagccaggtacatattcgacccatcagcaatcggcaggtacgtgatgtccccgacgtacacctgatttggcttattagcggtgaacttccggccgacaaggtcaggaaacactgtcttggttttatccgacacagtggtggtgaccttgcgtttctttgtgtagccaaacagcttcaacgagcgcatcacccgagcgacccgcttgtgatttacggggtcatgatccacctggtctttgagttcagcggtgatccgcttggccccataacaaccattttcggtggtgaagacagccttgactcgagccccgaggatcgcgtcggacatgaggcgtttcctgcgtgctgagcaggtacttttccatttatagtaggaagacctgttgagtttgaggacgtcacatatccgcttgaccgagtaggtcttggaggcgtcatcaacgaaccggaagcggatcaccaattcgtctcttccgcgaaatattttgcagctttccgcaggatatcgcgctcttctctcaagcgagcgttttcccgttccagtttccggatctgctcagcctcgttcacagaggctggcgagggtgtttcgttgggagctgcggtgccgtattttttcacccagttcgccaacgtggcgcggttgaccccgagatcggtggcgatggtctggatcgaagcctctggggagttctcgtacaaggcgacggcatcgcgcttgaactcctctgtataggtcttgcgtggcatggtggcagattacctttcccagcatcatgctggtttcaaggtgtccaccaaacaggggtcagtcccacgacgcgcttgtagacgatgatattgaggtcaaactcaacaccgctttacaggtagcagcagctttagaactacttcatttttcccttttggttcatgacgatgtcattgacggagacctctatcggcgaggcaaacttaattttattgggcagattctcattcatcgcacacctgaaagttttgcacaaacccagcgcgatccagagcatctagattgggcacaatctaatgggctacttatggggaatctttttcttgctgccacccatcaaatcttcgcccgccttgaccttccacatccccaacgggttcggctgttagatttactcaaccacacgatgaatgacacgattgtgggtgagtttcttgatgtgggattaagcagcaaagcaatcagcccgaatatggacattgctctagaaatgagtcggctaaaaacagccacatacagttttgagcttccaatgagagcagcggcaattctcgcggaactacctcaggagattgaaacacagataggtgagataggcaccaacttgggcatcgcttaccaattacaggatgattacttatctacttttggtgacgcagccgaacacggcaaagatgccttttctgaccttcgagaaggaaaagaaacgacaatcatcgcctatgctcgaaatactgctaaatggaatgatattcaagacaacttcggttccgcagatctgagcacctctcaggcagagcgaattcaacatcttctcatacagtgcggagcaaagaatcactccctaaatgccatctccgatcacttaaatatctgccgttcgatgatcgaaacactaagcacccaggtagatcccaaggctcaaaagttattactcaaacacgttgagcaactagccagccgcaaatcttag

SEQ ID NO: 36 - DNA, 584 bp, Corynebacterium glutamicum
  source: /note="ncgl0601"
atgctgaatatgcaggaaccagataaaatccatccggcagaatctccacttcgtaatatttatgacgtgaaaactagtgatcccaaaagtgaattagttgatcgttctggcatgtcggaagaagacattgcgcaaattgggcggctaatgaaatcgctggcaagtcttcgcgatgtggaacgtagtattggtgaagcctcggcacgttatatggagctaagtgcccctgatatgcgggctttgcactatttgattgtggcgggcaatgcgggcgaagtggtgactccaggaatgcttggagctcaccttaaactttccccggcatctgtaacaaagacgctcaataggctagaaaaaggtggacatattgttcgtaaggtgcaccccgtcgaccgcagggctttcgcccttacagtcactgatgccactcgtggagaggcgatgcggacgcttggtaagcatcaggcgcgtcgttttgatgctgctaaacgattaactccacaagagcgtgaagtggttatccgattccttcaggatatgacgcaggagttgtcccttaataatgcaccatggctcaacacgga

SEQ ID NO: 37 - DNA, 915 bp, Corynebacterium glutamicum
  source: /note="ncgl0641"
atgagttttcacatcacatccgtcaatgtcaacggcattagggcagcggtcaaacagcgaagcgaaacaaacctaggtttccttccgtggcttgaagaaactcgcccggacgttgtcctcctccaagaagtccgcgcaagcgaaaaagacaccgccaccgcactgcaacccgccttagaaaacggatggcactacattggtgccccagcagctgccaagggacgtgccggtgtcggcattttgtctaggcatgaacttgaagatgtgaacatcggttttggatctttccttgactccggccgctacattgaagcaaccatcaaagacaccaccctggatgtgccagtaaccgtggcatctctttacctcccctcaggctcagcgggcaccgacaagcaggatgaaaagtaccgcttcctcgatgaattcgaagggttcctggaccagcgcgctaaagaacgctcccacatggtcatcggtggcgactggaacatctgccaccgccgcgaagacctaaaaaactggaaaaccaaccaaaagaaatccggtttccttcccgacgaacgcgcattcatggattcagtctttggcaccttcccagatgaggcaacccaggttgcaggggccggcgacttcttcggtgccgtggactatgaaggaacgaggcgtcgagaagcaactagggaccctgcgtggttcgacgttgcacgtcgcctgcaacctgaaggcgacggcccctacacctggtggacctaccgcggaaaagccttcgacaccggtgcaggatggcgcatcgactaccaagcagcaaccgcagcgatgctcgaacgcgcagaacgctcctgggtagacaaagccactgcatacgatttgcgctggtcagatcactcaccactgaacgtgatctacacctaa

SEQ ID NO: 38 - DNA, 927 bp, Corynebacterium glutamicum
  source: /note="ncgl0663"
atgtcatctcatgatctcgttgacgtagttgtcgtcggcgctggcgctgcaggtctcgccgccgctgtcgcgctcggccgctcactgcgcagtgtcaccgtcatcgacgctggtcaaccccgtaaccgctattcgcacgctgctcacaatgtcctcggccaggaaggcattgcgcccgccgagctgctggaaaaaggccgcgccgaagcgtgttcctatggcgtcaccattgcgcccgggcgcgtagcaaaagttgagcgcaccggttccaccttcgccataacgcttgacgacgcctccctccttcactcccggcgcatcattttggcccacggcgccgttgacgatctgccagaggtggaaggactgtcagatttttggggaaccaaagtgttgcactgcgcttactgccacggctttgaggcccgcgattctgaaatcgtcgtggtgggtgcctcgcccatggctgcgcaccaagcgttgatgttctcgcagttgtccaaaactgtcagcttggtgggcacgatcgacattgatgaacaaacccgcgagcgcctagatagtgctggagtaaaagtgttgggcaccaatgcggtgcgcgtatccgccgaaggtgatggcctgtctgtggaactgtccgaaggcgatcatttaagctgcgacaacatcgtggtggcatctcgtccactggtggagggcacgctgtacacccaacttggtggtcagatggaagaaaacccaatgggcaggttcattccaggtacccaaaccgggcgcactcctattgaaggtgtgtgggctgccggaaacgcgcaagctcccatggcgatggtctatggttccgctgctcaaggcgtgatggctggagcagagatcaactttgatctgatcctggaagatatttccttagcaagcgcgcagagctaa

SEQ ID NO: 39 - DNA, 1326 bp, Corynebacterium glutamicum
  source: /note="ncgl0668"
atgtcgaagctttacgcgggggcaaggatcaatgcactgcgccgaacccaccaactgacccaatcagcattagccgacaagcttgatctctccacgagctatctcaaccagttggaaaatgatggccggccgcttactgccacggtgcttttgcaactgatgaaagtctttgatgttgaggccagttatttctcccctgaccggggcacagccacggctacccgactggcagaaaccttggctatgaatcaggggccgacgatgtcgatggatgatctgttagatttcgcggatcgtttccctcagttggcacagcatattatccagcctgctgaggtcgatcccgcacatagttctgcgcatgattttgttcgggattattttgccacccacaagaactacattgattctcttgatcgccttggtgaggagttggcaaccgccattggtcagccggggcttcgggttaccaggctcgcgcagttgcttgatgcggagtacaacatcacggtgcgtttccgggcgccagatattactggccggaggcactttgatccccaatcgcgtcagattctgctgcggcaagatctcagcgaggcgcagcagtgttttcagttggcggaggaattgacgtttcttgctcatgcagagctcttggataccctgaccacagatcaaccggatctcccttatgaggcagctatccgcctggctaaggtgggtctctcccaatacttcgcggctgctgttgtcatgccgtacacccgctttttggaattcgcccaggacaagcactatgacatcgagttgatctctgaggcgtttggagtgtctttcgagtccgcgtgccaccgcttgtctacgctgcagcgttcgggggcgtcaggggtgccgtttttctttgtgcgctcggaccgggcaggaaatatttccaagaggcaatctgcagctacgttccatttctcgcgaacagacggcacttgtcctttgtgggcgctgcatcgagcttttgaacgtcaaggaaacatcacccgccaggttgctcgcatgccggatggccggacctatttgtggctcgcacgcgcggtgaaaggtcgaactcatggtttcgggcatcctgctgcggaattcgccatcggcctgggctgcgatatcagcgaggcaccaggcttggtgtattcccaaggcctcaatttggatccagagtccgccgcagagatcggccctggttgtcggatctgtcctcgggagaactgtgtgcagcgtgcattcccaccatcgggtcaagaatctatccgcccagcccctgtccaactcctcaactaa

SEQ ID NO: 40 - DNA, 1275 bp, Corynebacterium glutamicum
  source: /note="ncgl0737"
gtgtcttctgaaagccccagacctacgttcacagagctcggcgttgcggtggaaatcaccgacgcactcgaagccctcggcatcaaccgaactttcgcgatccaggagtacacacttcccatcgcgctcgacggccacgacttcatcggccaagcccgcaccggcatgggcaaaacctacggattcggtgtcccactcctcgatagagtcttcgactcagccgacgtcgcagcaaccgacggaaccccccgagccctcgtcatcgtgcccacccgagaactcgcagtccaagtcggcgacgacctccaacgcgcagcaaccaacctgccgctaaagatcttcaccttctacggcggcacaccctacgaagaacagatcgacgcactcaaagtcggcgtcgacgttgtcgtaggcacacccggacgactactcgacctgcacaaacgaggcgcgctatcgctcgacaaagtagcgatcctagtcctcgatgaagccgacgaaatgctcgatctgggctttctgcccgacatcgaaaaaatcctccgtgccctcacccaccagcatcaaaccatgctgttctctgccacgatgcccggcgcgatcctcacactcgcacgcagcttcctgaacaaaccagtgcacatccgagccgagacatcggacgcctcagcaacacacaaaaccaccagacaagtggtttttcaggcacacaaaatggacaaggaagccatcaccgcgaaaatcctgcaagcgaaagatcgcggcaaaacgatcatcttcgcccgcacgaaacgcaccgcagcgcaagttgccgaagacctagcctccagaggattctccgtcggatcagtgcacggcgatatgggccaaccagcccgcgagaaatcactcaacgcattccgcacaggaaaaattgacatccttgtagccacagacgtagccgcccgaggcatcgatgttgatgacgtcacccacgtcatcaactaccaaacccccgacgatcctatgacctacgtccatcgtatcggacgcacgggacgcgcagggcacaacggaacagccgtcactcttgtcggctacgacgaaaccctcaaatggaccgtcatcgacaacgaactcgaactcggccaaccaaacccaccacaatggttctccacctcaccagagctgcttgaagcactcgacatcccagaaggtgtcaccgaacgagtcggaccaccaaccaaagttctaggcggaacagccccacgaccaccacgccgcacccggaaataa

SEQ ID NO: 41 - DNA, 1107 bp, Corynebacterium glutamicum
  source: /note="ncgl0767"
atgcgtcccgaattttctgcagaactctccgagctagacagcacgctgacaaccattgaaaaagtgctgaactcgcaagagatgtctgaccgagtcagagaacttgaagctcaagcagctgacccgtctctgtgggatgaccctgaccatgcacagcaagtcacctctgagctgtcccacgtccaggcagagctgcgcaaaatcaccgatctgcgccagcgcatcgaagatctccccattatggtggaactcgcagaggaagaagacggcgatacctccatcgcggaagaagaactcgccgatctgcgttctctgatcgatgcgttggaagtaaagaccatgctgtcgggtgaatatgatgctcgcgaggcagtgatcaatattcgattcggtgccggtggtgtcgatgctgcggactgggctgaaatgctcatgcgcatgtacacccgctgggcggaaaagaacggccacaaagtagatatttacgatatttcctacgccgaagaagccggcatcaaatccgccaccttcgtggtccacggcgactacatgtacggccagctctccgtggagcaaggcgcacaccgcctcgtgcgcatcagtccttttgataaccagggcaggcgccaaacctccttcgccgaggtagaagttcttcccgtggtggaaaaagtggactccatcgacatccctgatgccgatgttcgcgtcgatgtctaccgctcctccggcccaggtggtcagtccgtgaacaccaccgactctgccgtgcgcctgacccacatcccaaccggcatcgtggtgacctgccaaaacgagaaatcacagatccaaaacaaggcatccgcgatgcgtgttctccaggcaaaactgcttgagcgtaaacgccaggaagaacgcgctgaaatggatgccctcggagctggaggcaatgcatcctggggtaaccaaatgcgttcctacgtgctgcacccttatcaaatggtgaaggatctgcgcaccaactttgaagtcaacgatccgcaaaaagtccttgacggcgatatcgatggccttttggaagcaggtattcgctggcgaatggctgagagccagtcggcggaataa

SEQ ID NO: 42 - DNA, 771 bp, Corynebacterium glutamicum
  source: /note="ncgl0813"
atgccagaaggtgattccgtattccaactctcccgcaaacttcaattcatgcgcggaagagaagtgctggaaacctccctgcgtgtgccatcagtggcgcttcacgatttcaccggtcaaaccgtcaaccgcgtatggccctacggaaaacacctcttcatgcaattcggtgaagagatcctccacacccacctcaaaatggaagggacgtgggctgtccaccgcaaaggcgatcgctggcgcaaacctggacacaccgcgagggtagtgcttgtgctgtcggaaaacatcgaggtggtggggcattccctcggctttgtcagagtgttccccgcaaaccgctactccgaagagatcgcttacctcggccccgacgtccttgccgaagaattcgacatcaacacagcacggaacaatattgcatcgaacccttcccgaacaattggcgaagccctcctcgaccaatccaacctcgctggagtaggcaacgaataccgcgctgagatctgcttcctcatgggcgtccacccggcgacacaagtaggatacgttgacgtcgaaaaggctctgaagattacccgaagactcatgtgggaaaatcgaaattcgccgattcgagtgaccaccggggttcgacgcgccggggaatccacctatgtgttcgggcgtaacaataaaccgtgcaggagatgccgaaccccaatcgtgaaagccgagttgggggagcgaataatctggtggtgtccgcgctgccaaccgctaaactcgtga

SEQ ID NO: 43 - DNA, 510 bp, Corynebacterium glutamicum
  source: /note="ncgl0823"
atgtccataaaacatgcactcttggtgctcatgctcgacgaaccaacctcggcaagtcagctgcaaaccaagtttgaagaaacaatggggatctggcagctcaatatcggccaagtcacccaaaccatccagcggctacagcgcgacggcctggcggaaaccgcaggcaccaccgtcagttccaacggccgcaccgtagacactttccagcccacggacttaggtcgcgaacttgtcgcgcagtggttcgaaagtcccgtcaccgtcacgctgtccgaacgcgatgaattagtcaccaaaatcgccatcgcagaatcacgtggcctcaatttgattccacttttagacattcaacgcaacacagtcatggcggaactacgcgcactcaacaaatccagccgcgatctcgccgaaaccagaaacacccagcggctcctcgtcgaaaagcgaatctttgaactggaagcacaggcacgttggctcgaccgaattgaagcattggagcagtaa

SEQ ID NO: 44 - DNA, 1563 bp, Corynebacterium glutamicum
  source: /note="ncgl0827"
atgagcgatgatcgtaaggcaattaaacgcgcactaattagcgtgtatgacaagactggcctggaggatctagcccaggcacttcaccgcgcgaacgtggaaattgtttccaccggatccactgcggcgaagattgctgagcttggtattcctgttaccccggttgaggagctcaccggtttccctgagtgccttgagggccgtgtgaagacactgcattctaaggttcacgctggcatcttggcggacacccgcaaggaagaccacctgcgtcagctcaaggaacttgaggtcgccccattccagcttgtcgtggtgaacctgtacccatttgctgagaccgttgcgtccggcgccgatttcgatgcttgcgttgagcagatcgacatcggaggcccatccatggttcgtgctgcggcaaagaaccacccatctgtcgctgtggttgtttcaccaaaccgctacgaggatgtccaggaagctttgaagaccggtggattctcccgcgcggagcgcaccaagttggctgctgaggctttccgccacaccgcaacctacgatgtcaccgttgcaacctggatgagcgagcagctggctgccgaagattctgagactgagtttccaggttggatcggcaccaccaacaccttgtcccgcagcttgcgttacggtgagaaccctcaccagtctgcagctttgtacgtgggcaacacccgcggacttgcacaggctaagcagttccacggcaaggaaatgagctacaacaactacaccgattctgatgctgcatggcgtgcagcgtgggatcacgagcgtccttgtgtagctatcatcaagcatgcaaacccttgtggcattgctgtttctgatgagtccatcgcagcggcacaccgcgaggcacacgcatgtgactctgtgtccgcattcggtggcgtcatcgcgtccaaccgtgaagtcagcgttgagatggctaaccaggttgcagagatcttcactgaggtcatcatcgctccttcctacgaagagggcgctgtggagatcctgagccagaagaagaacatccgtattcttcaggctgaagcacctgtgcgtaagggctttgagtcccgtgagatctccggcggtctgcttgttcaggaacgcgacttgatccacgctgagggcgacaactccgcaaactggactcttgctgccggctctgctgtttctcctgaggttctgaaggacctggagttcgcgtggactgcagttcgttccgtgaagtccaacgcaattctgttggctaagaacggcgctaccgttggcgttggcatgggacaggtcaaccgcgttgactctgctcgcttggctgtcgaccgtgcaggtgcagagcgcgctaccggttccgttgctgcttccgatgcgttcttcccattcgctgatggctttgaggttctcgctgaggctggcatcactgctgttgtgcagcctggtggatccattcgcgacaacgaggtcattgaggcagccaacaaggctggcgtgaccatgtacctgactggtgcgcgacacttcgctcactaa

SEQ ID NO: 45 - DNA, 1161 bp, Corynebacterium glutamicum
  source: /note="ncgl0853"
atgagttttgctgaacatgcgatcatctggcacgtctaccccctgggcgctttgggcgctcccatccggcctgaatctcccgcacctgtcacacatcggctccccaatctaattgggtggctggattatgttgtcgaactaggctgcaacgccctcatgctgggaccggtattcgagtccgtcagccacggctacgacaccctcgatttctaccgcatcgacccgcgcctcggcaccgaggaagacatggacgcgctgctggaggctgcgaatcagcggggcattggagtgcttttcgacggcgtcttcaatcatgtttccagttcctctaaatatctcgacctgaccaccggggtgtcatttgaaggccacgacatcctggcggaactcgaccacacgaatcccgccgtagtggatctggttgtcgatgtcatgaaccactggctcgaccgcggaatcgcaggctggcgactcgacgctgtctacgccatcgcccctgaattttgggaaaaagtcctgccagaagtgcgacgaaaacacccacacgcatggatagtgggggagatgatccatggagattactccgactacgtgaaaagctccggcattgattccgttaccgaatatgaactgtggaaagccatttggagcagcatcaaagagcgcaatttctttgaactcgaatggactttgagtcgccacaatgaattcctcgatactttcgtaccgcagacattcattggtaaccatgacgtcacccgcattgccacccgaatcggtcaatcaaatgcgatcctggccgcagcgatcctcttcacggtcggaggaaccccaagcatttactacggcgatgagcagggctttacgggattgaaagaggataacgttttcggtgatgatgccattaggccacctcttcctgccgagttttctccactgggcacctggattgaaaacatttataaggctctgatcgcgctgcgcaggcaacacccatggttgtatcaggcgcacaccgaagtccttgagattgctaatgaagcgatgacctataagtccgtcggtcttggaggtgaagagctgacagtgcatcttgatttggaagaggtgtctgttcggatccttgatggcgagaaggtgctgtttcagtacagcgcttag

SEQ ID NO: 46 - DNA, 933 bp, Corynebacterium glutamicum
  source: /note="ncgl0874"
gtgaaaattaccgctaaggcgtgggcgaaaaccaacctgcatttaggtgtgggaccggcccgcgacgatggatttcacgagctcatgacggtgtttcaaaccattgatctgtttgacactgtcaccttaaccaccctcgatgaggagttggtggaggaggggagcgtcgtcaagcaattatctgtgaccggtgcccgtggcgtgcccgaggacgccagcaatcttgcgtggcgcgctgtcgatgcgttggttaagcggcgcgcggaaaagacgccgctgcctgcggtttcgctgcatatagccaaaggaattccggtggctggcgggatggctggtgggtctgcggatgcggctgctaccttgcgcgcggtggatgcctggattgggccgttcggcgaggacacattgctggaggttgctgcggagctcggctcggatgtgccgttttgcctgctaggcggtaccatgcgtggtacaggacgcggcgagcaactggtagatatgttgacgcgtggcaagctacattgggtggtggccgcgatggcgcatggactgtccacgcctgaggtattcaaaaagcatgatgagctgaatccggaatcgcatatggatatcagcgacctcagcgccgcacttctcaccggcaacaccgccgaggtggggcagtggctgcacaacgatctgaccagcgccgcactcagtttgcgccctgaactgcgcagcgtcctccaagaaggaacccgctccggcgcgcatgcaggaatcgtctccggctccggcccgaccacggtattcttgtgcgaatcggagcacaaagcgcaagacgttaaagaggcgctaatcgacgccggccaggtgtacgctgcttacaccgccaccggccctgcggcctcaaccgccgaccagcgcggcgcacacattttgactgtttca

SEQ ID NO: 47 - DNA, 483 bp, Corynebacterium glutamicum
  source: /note="ncgl0877"
atgagttcgctcgacaatgccccgctgctggaattggatgttcaggaatgggtaaaccacgaaggcttgagcaatgaggacctgcgcggcaaggttgtggtggtggaggtgtttcagatgctatgccctggatgcgtgaatcacggtgtccctcaggctcaaaaaatccaccgcatgattgatgaatcccaagtgcaagtcatcgggctgcacagcgtgtttgagcaccatgatgtgatgacgcctgaggctttgaaagtgttcatcgatgagtttgggatcaagttccccgtggcagtggatatgccgagggaaggccagcggattccttcgacgatgaaaaagtatcgtttggaaggaacgcccagcattattttggctgatcgaaaaggacggatccgtcaggtgcaattcgggcaggttgatgatttcgtgctgggattgctgctcggtagtttgctgtcagaaacggacgaaacctaa

SEQ ID NO: 48 - DNA, 978 bp, Corynebacterium glutamicum
  source: /note="ncgl0905"
atgactgctcactggaaacaaaaccaaaagaacctcatgctgttttcgggtcgtgcgcacccagaactggcagaagctgtagctaaagagctcgacgtcaacgtcaccccaatgacggcacgcgatttcgccaacggtgagatctacgtccgcttcgaggaatcagttcgtggctccgactgcttcgtcctgcagtcccacacccagcctctcaacaagtggctcatggaacagctgctgatgatcgacgctttgaagcgtggttccgcaaagcgcatcaccgcgatcctgccgttctacccttacgcccgccaggacaagaagcaccgcggccgcgagccaatttctgctcgcctcatcgccgacctcatgctcaccgctggcgcggaccgtatcgtgtccgtggacttgcacaccgatcagatccagggcttcttcgacggcccagtcgatcacatgcacgccatgccgatcctcaccgatcacatcaaggaaaactacaacctggacaacatctgcgtggtctcccctgacgcaggtcgcgtgaaggttgcagagaagtgggctaacaccttgggcgatgccccaatggcgttcgtgcacaagacccgctccaccgaggtagcaaaccaggttgtcgccaaccgcgtcgtcggtgacgtcgacggcaaggactgcgtgcttctcgacgacatgatcgacactggcggcaccatcgccggcgctgtgggcgtcctgaagaaggctggcgcaaagtcagtcgtcatcgcctgcacccacggtgtgttctctgacccagcccgcgagcgcttgtctgcatgcggtgctgaagaagtcatcaccaccgacaccctgccacagtccaccgagggctggagcaacctgaccgttttgtcgatcgcaccgctgctggctcgcaccatcaacgagatcttcgaaaacggctccgtcaccaccctcttcgagggcgaggcctaa

SEQ ID NO: 49 - DNA, 1971 bp, Corynebacterium glutamicum
  source: /note="ncgl0916"
atggaagtgacccaaagcacattccttaaatcggtagctgcgttcactgtcgcagccttaaccctgaccatctcttcgtgttccagcggtgaagacacctccgcaagctccacggatactgaaaactcctcaacccaagcagcgtctcccccacttgcaccttgtgaacttcccgccgacgcttctgctgaagaggaagtagaaggcactcacacaggtgaagatatttctgttgccccggaaatcggtaccggctaccgcgagggcatgacccctgttcaaacccaaggttatgcggtggcaactgcaaaccccatcgcttctgaagcagcctgcgcggtgttaagagaaggcggcactgccgctgatgctcttgtcaccgcgcagtttgttttgggactgacggaaccgcagtcgtctggccttggtggtggcggatacattctgtactacgacgccgaagccaatgcggtgacagccattgatggccgtgaaacagcgccagttgctgctgatgaaaactatctcattcatgtttctgcagaggatcaaacgacacctgttcctgatgcccgacgttccggcaggtcaattggtgtgccaggaatcgtggcagcccttggacagctgcatgattcattcggaaagacctcctggcaggacgtgctgacaactccgcagcagctcgcaactgatggtttttccatcagccctcgcatgtcagcatcaattgctaactccgctgaggatctctcccacgatccggaagctgccgcatatttccttgatgaaaacggtgatgcgaaggcacccggcacacttttacaaaaccctgactatgcagaaacgattcgtctcatctctgaaggtggccccgatgcgttctacacgagtgagattgcagcagacatcgtggaacgcgccacccgtgaggttgacggtttcacaccatcactgatgagcacggcagatttggctgcctacactccggaaaatcgtgaagctttgtgtgctccctaccgcgacaagattgtttgtggcatgccaccgtcatcatcgggtggcgtcacagtgatggaaaccctgggtatcttgaacaactttgatctcgcccaatacccacccactgaggttggtttggatggcggattgccaaatgcggaagctgttcacctgatttcagaggccgagcgcctggcttatgctgatcgcgatgcttacatcggtgatcctgctttcgtggaagttccagcaggtggtgtcgaagagttgatcagcgatgtctacacgggtaaacgctcagaacttattgatccagagcattcaatgggtcaggcaactgctggtctgagccaggaaccagtcatggctgccctgccggaaagtggcaccagccatatttccatcatcgattcctatggcaacgcagcatcgttgaccaccagtgtggaagctgctttcggttccttccacttcacccgtggtttcattttgaataatcagctgacagatttctccgctgaaccacttgatgaggacggcgagcccgtggccaaccgagtcgaatcagcaaagcgcccacggtcttccatgtcgccaatgctggtgttcaacgccagtggcgatggtgaaatcgcggatctgaatatggtgctgggctcccctggcggatccttgattattcagtacgtggtgaaaaccctggtcaacatcatcgactgggatatggatccacagcaggcagtgtctgcgcccaactttggtgtgatgaaccagcctaagactggactgggaagcgagcatccgctgatcgccaatgattcagcagagcttgtaactgaactggaaagcaaaggccacgaagttaatgtgggcgagcaatccagtggcctatcggcgttggtgaaaaacggcgacaccattgtcggtggcgccgatccacgtagagaaggcgtggtcttgggtggctaa

SEQ ID NO: 50 - DNA, 1245 bp, Corynebacterium glutamicum
  source: /note="ncgl0966"
atggcatttggattttttagtagacgtaagaaaaagaacaaagacaaaaacccgaatgaaaattcagcagtgcccgcacactctgaagattcacctcaggaggtttttgagggtaatggtcgtcaggtaggcgaccccattgaacagcaggttgatcgagatgctaaaggtcgtctcacagcggcggatttcttgccggacgctgatctgccacagctgaatcgttcgcgtgcaaatatgctgcgccgtgaattggagtaccgtttttcactccagaatgcccacattaatatcgatggaaacacggccatgattcagcgttcagatggcggggcagcacatgtctcgttgcgcaccctcgcgatgaatgcagctggccttgataactttgatcaactccctgaactggtggaaagcttcgttcacggcacgctggccgatgcaacattaaacgatctttctactgctgacctgtataaagcactgcgccttcgcctgctgccaacacctggtgaaggcgacgatctagttgagcatggactcgaccgggaaagccagatccgcgacgattcaatcctgcgcaccttcacctctgacatgtcgatcgcgctggtgctcgataccgagcatgccatccgcatccagccactcaaagagctcgaggagttcgatgacctcagcgccctagagcgggctgcggaccgcaatacctggcaagagctttacgacgcaaacgttgacgcttccttcgtcgacgctgaatcagacagcgaagggtcatcattttgggctttcgaatctaactcgtactacctgggtagtgcaccactgttcctcaacgatttgttggcaaagtgggcacctgacctggaccaaagtgatggcgtcatctttgctgtccctgatcgtgatctgttgattgcgcgtcctgtgaccaccggcgaagatctgatgaacggaatcaccgcgatggtgaggatcgcgatgcgctttggcctcgggaacccgacgtcgataagcccgcgcctgcacctgctgcgcgacaaccaggtgaccaccttcaccgacttccgcgtcgtctctcctgaaatggaagctgaatgggaagacagcgcgtttgacgcgccaccggccggcgcgatcggcattgaggtgcgcccagatccgtatctgatggagcgcctccaacagggcggctttggtgatttcggagatttcggcaagccccgcgatctagatatgtag

SEQ ID NO: 51 - DNA, 771 bp, Corynebacterium glutamicum
  source: /note="ncgl1065"
atggctcctaaacaaactcccagcccagagaagaatcgaaacctggtgggaccagttctgcaacgtcggcagacagagggtacttttgatcaacgcttgctagaaatgcgcgctgatcacaattggaagcacgccgatccatggcgtgtactgcgtattcagtctgaatttgtggcgggttttgatgccctccacgagatgccaaaggccgtaaccgtctttggttctgcacgcattaaagaggatcacccgtactacaaggcgggtgtagaacttggtgaaaagctcgttgctgctgactacgcagttgtcaccggtggcggtccaggtctgatggaagcccccaataagggggcaagcgaggccaatggtttatcagttggtctgggcattgagttgccacatgaacagcacctgaacccttatgtggatttgggtctgaacttccggtacttcttcgcacgcaagaccatgttcctgaaatactcccaggcttttgtgtgtctgcctggcggtttcggcacgctcgatgagcttttcgaggtcctctgcatggtacaaaccggcaaggtaaccaactttcccatcgtgctgatcggcactgagttttgggcaggtttggtggattggatccgtcaccgcctggtagaggaaggcatgatcgatgagaaggatgttgaccggatgttggtcactgatgacctggatcaggccgtcaaattcatcgtcgatgcacacgctggattggacgtagcgcgtcgccacaattaa

SEQ ID NO: 52 - DNA, 489 bp, Corynebacterium glutamicum
  source: /note="ncgl1124"
atgacaacaccacgatggctctccactgaagagcaacaactctggcgcatgatcttgtctgcaacccgcaaaatggaacgcacactagatgagaccctcgtggaaaaccacaacctgaccacttcagaatttgcagtactagttactctttctgaggcaacgggtcaacaaatgcgcctgcgagacatgtgccaagaactagattgggaccgcagtagaacctcccaccaagtcacccgcatggacaaaaagggcttagtggccaaggttaaatgcgcaggtgacgcacgaggtgtgaacgtagaaatcaccccggaaggtgaacgacgcctcaaggatgccgtacctgctcatgtagagacagtccgccaactgattttcgatcccatggaagagcaccacatggaaggacttcgttcctacctcaccgcagtgttgaactccaacacatgcattgagatcaacaaccaacgcgcggcagagctgtaa

SEQ ID NO: 53 - DNA, 930 bp, Corynebacterium glutamicum
  source: /note="ncgl1137"
atggcaattgaactgaacgtcggtcgtaaggttaccgtcacggtacctggatcttctgcaaacctcggacctggctttgacactttaggtttggcactgtcggtatacgacactgtcgaagtggaaattattccatctggcctggaagtggaagtttttggcgaaggccaaggagaagtccctcttgatggctctcacctggtggttaaagctattcgtgctggcctgaaggcagctgacgctgaagtgcctggattgcgagtggtgtgccacaacaacattccgcagtctcgtggtcttggttcctctgctgcagcggcggttgctggtgttgcagcagctaatggtttggcggatttcccgctgactcaagagcagattgttcagttgtcctctgcctttgaaggccacccagataatgctgcggcttctgtgctgggcggagcagtggtgtcgtggacaaatctgtctatcgacggcaagagccagccacagtatgctgctgtaccacttgaggtgcaggacaatattcgtgcgactgcgctggttcctaatttccacgcatccaccgaagctgtgcgccgagtccttccaactgaagtcactcacatcgatgcgcgattcaacgtgtctcgcgttgcggtgatgatcgttgcgttgcagcagcgtcctgatctgctgtgggagggtactcgtgaccgactgcaccagccttatcgtgcagaagtgttgcccgttacctccgaatgggtaaaccgtctgcgcaaccgtggctatgcagcgtacctttctggtgctggcccaaccgccatggtgttgtccaccgagccgattccagacaaggttttggaagatgctcgcgagtctggcattaaggtgcttgagcttgaggttgcgggaccagtcaaggttgaagttaaccaaccttag

SEQ ID NO: 54 - DNA, 2433 bp, Corynebacterium glutamicum
  source: /note="ncgl1152"
gtgacaaccacagacaacaccgcagcgaatcagggtgaactgaccgccctccgactgccggatctgcgcaaaattgccgccgaccttgggctcaagggaacctcggcattgcgtaagggcgatctgatcaacgccatctctgcagcccgcgagggtaagccaaccgcagctgcgaagaagacttccccacgcaaggccccatcacgcacccgtgcgacacagccttccgcaccggttgagcaagcacaagaagctcccgcgcaaacttcaactgcacctgcttcagcaccatctgaagagactcccgcagctcccgctcgtcgtggacgtcgccgtgtaaccaccaccgcgaccaccccagagccagcagcgcctgcacaatcccagcctgcagaagctcaaccagcacagactcaggctgcacagcaagaagaacttcctgttgcagcgaaggagtccgcaccagctacagaaaacactcagggccaatcccagggccaagctcagggcgatgagcacgatgatcgctttgagtcccgttctgctgcacgccgagcacgccgcaaccgtcagcgccagatccaccgcgatggcgatgacaatgcgaatgcaaacacagagtctgagcagaacacccctgcccagaatgcaaccgcacaggctgagtctgagcagactgcagctcctgcacaggctgaagcagctgagcagaaccagaacgataacagcgagtcctccgagaaccgcagcgataactaccgcaacaacaatcgtcgttcccgcaacaaccggaacaatcgcaattaccgcgataacaacgagtcctctgataatgcaggacagtccagcaatgatgatgccgacaacaatcaggcacggtctgaggacaataacgacgatcgccgttctcgtaataaccgtaacaacgaccgcaatgatcgtaacaatcgcaattaccgcgataacaacgagtcctctgataatgcaggacagtccagcaatgatgatgccgacaacaatcaggcacggtctgaggacaataacgacgatcgccgttctcgtaataaccgtaacaacgaccgcaatgatcgtaacgatcgcaattaccgcgacaaccacaacgacgacaacgatgatcgccgcaaccgtcgcggacgccgcaaccgccgtggacgcaacgaccgtaacgatcgcgataaccgggataaccgggataaccgcgacaacagcaacgatggcgacaacaaccagcaagatgagctgcagcaggtagcaggcatcctggacatcgtggaccataacgtcgcattcgtgcgcaccaccggttaccatgctgcaccttctgacgtgtttgtcagcaaccagctgatccgccgtatgggtcttcgttccggtgacgccattgaaggtcaggttcgcatgaaccagggtggtggcaaccacaacaaccatggtcgcaaccgtcagaagtacaacaacttggtgcgcgtggagatggttaacggtcttcctgctgaagagactcgcaaccgtcctgagttcggcaagctgactcctctgtacccgaaccagcgtctgcatttggaaactgagcagaagattcttaccactcgtgtgatcgacttgatcatgcctattggtaagggacagcgtgctttgattgtgtcgccacctaaggctggtaagaccacgatcctgcagaacattgcgaacgctatttccaccaacaacccagagtgctacctcatggttgttttggttgatgagcgtccggaagaagttactgatatgcagcgctccgtcaacggcgaagtgattgcttctacttttgatcgtccaccatcagagcacactgcggttgctgagctggcgattgagcgtgcgaagcgcctggtggagcagggccaggacgtcgttgttctgcttgactccattactcgtttgggccgtgcgtacaacaacagctcacctgcatcgggacgtattttgtccggtggtgtggattccaatgcactgtacccgccgaagcgtttcttgggtgctgctcgaaacatcgaaaatggtggatctttgaccatcatcgcaactgccatggtggaaaccggctctgctggtgacaccgtgatcttcgaggagttcaagggcactggtaacgctgagctgaagctggatcgtaagatctctgagcgccgcgttttcccagctgtggatgttaatccttctggtactcgtaaggacgagctgttgctcaacccggacgaggctcgcattatgcacaagctgcgtcgtattctgtctgcacttgataatcagcaagccattgatctgttgatcaagcagctgaagaagaccaagtccaatgcggaattcctcatgcaggttgcttccagcgctccaatggcaggcacagaaaaagaggaggattactcctaa

SEQ ID NO: 55 - DNA, 228 bp, Corynebacterium glutamicum
  source: /note="ncgl1187"
atgcacatgaacgcagaagaaatcggaatggcgctgctcaacggacgcaaagagctaggccttagacaaggagaactcgcagacctggctggagtttctgaacgattcatccgcgatgtcgaaaagggaaaaactaccgtccgcctggacaaagtcatcgatgtactcagcgtccttggactcgagctttctgttggaattcacgatcccctcaaggttaatcaatga

SEQ ID NO: 56 - DNA, 2043 bp, Corynebacterium glutamicum
  source: /note="ncgl1196"
gtgactgaagataatgctcaactgcgtagaacgtggaacgacttagccgagaaggttcgttatcaccgagatcgttattacaacgaacagccagagatccctgatgctgattttgatgcgctttttaagcagcttcagcagttggaagaagaccacccggagctcgccgtccctgatagccccacgatggttgtgggcgctccggtggcagagcaatcaagctttgacaatgttgagcacttggagcgaatgctcagcttggacaatgtttttgatgagcaggagttgcgtgattggttgggcaggacgccagccaagcagtatttgacggagttgaaaattgatggcttgtccatcgacttggtgtatcgcaatggccagttagagcgtgcggctactcgtggtgatggtcgcgtgggcgaggacatcacggccaatgctcgcgtgatcgaagatatcccgcaccagcttcagggcactgatgaatatcctgtgcctgctgtgctggagattcgcggtgaggtgttcatcactgtggaggatttcccagaggtcaacgcgcagcgcattgctgatggtggcaagccgtttgccaacccgcgtaatgctgcggctggttctctgcgtcagaaaaatattgaggacgtgaagaagcgtcgcctgcggatgatcagccatggcatcggtttcactgaaggctttagccctgcgtctcagcatgatgcgtatctggcattggctgcctggggtttgcccacctcgccgtacacagaggctgtgactgatccagaagatgtggtgaaaaaggtcagctactgggctgatcaccgccacgacgcactccatgagatggatggcctggtgattaaggtcgatgacatcgcatctcagcgtgctttgggctccaccagccgcgcgcctcgctgggccattgcgtataagtaccctccggaggaggtcaccaccaagctgcttgatattcaggttggcgttggtcgcaccggccgtgtcaccccattcgcggtcatggagcctgttcttgttgcaggatcaacggtgtctatggcgacgctgcataaccagagcgaagtcaagcgtaaaggcgtgctcatcggtgacaccgtggtcatccgcaaggcgggcgaggttatcccagaggtgcttggccctgtcgtagagcttcgtgacggcacagagcgcgagtacatcttcccaacgctgtgcccagaatgcggtacccgtctggcgcccgcgaaggccgatgacgtggattggcgttgccccaacatgcaaagctgtccaggtcagctgtccacgcgtttgacctaccttgctggtcgtggcgcttttgatattgaagcattgggcgaaaagggcgctgatgacctcatccgcaccggcattttgcttgacgagtctggcctgttcgacctcacagaggacgatctgctgagctccaatgtctacaccaccaacgccggcaaagtaaatgccagcggcaagaaactgctggacaacctgcaaaaatccaagcagaccgacctctggcgagtcctcgtggcactatctatcaggcacgtaggccccaccgcagcgcgcgcccttgcaggtcgctatcattccatccaggcgcttaacgacgcccccctcgaggaactctccgaaaccgatggagtaggtaccatcattgcccaatccttcaaggactggttcgaggttgattggcacaaggccatcgtggacaagtgggcagccgctggtgtgactatggaggaagaagtaggggaggtcgctgaacaaacccttgaaggcctaaccatcgtggtcaccggaggattggaaggcttcaccagagattcggtgaaggaagccatcatctcccgtggcggaaaagcctctggatctgtctcgaagaaaactgactacgtggtggttggtgaaaacgcaggttccaaggccaccaaggcagaagaactagggctgcgcattctggatgaggcaggattcgtccgtttgctcaataccggctcagctgacgaatag

SEQ ID NO: 57 - DNA, 1041 bp, Corynebacterium glutamicum
  source: /note="ncgl1202"
atggaagacatgcgaattgctactctcacgtcaggcggcgactgccccggactaaatgccgtcatccgaggaatcgtccgcacagccagcaatgaatttggctccaccgtcgttggttatcaagacggttgggaaggactgttagccgatcgtcgcgtacagctgtatgacgatgaagatattgaccgaatcctccttcgaggcggcaccattttgggcactggtcgcctccatccggacaagtttaaggccggaattgatcagattaaggccaacttagaagacgccggcatcgatgcccttatcccaatcggtggcgaaggaaccctgaagggtgccaagtggctgtctgataacggtatccctgttgtcggtgtcccaaagaccattgacaatgacgtgaatggcactgacttcaccttcggtttcgatactgctgtggcagtggctaccgacgctgttgaccgcctgcacaccaccgctgaatctcacaaccgtgtgatgatcgtggaggtcatgggccgccacgtgggttggattgctctgcacgcaggtatggcgggcggtgctcactacaccgttattccagaagtacctttcgatattgcagagatctgcaaggcgatggaacgtcgcttccagatgggcgagaagtacggcattatcgtcgttgcggaaggtgcgttgccacgcgaaggcaccatggagcttcgtgaaggccacattgaccagttcggtcacaagaccttcacgggaattggacagcagatcgctgatgagatccacgtgcgcctcggccacgatgttcgtacgaccgttcttggccacattcaacgtggtggaaccccaactgctttcgaccgtgttctggccactcgttatggtgttcgtgcagctcgtgcgtgccatgagggaagctttgacaaggttgttgctttgaagggtgagagcattgagatgatcacctttgaagaagccgtcggaaccttgaaggaagtcccattcgaacgctgggttactgcccaggcaatgtttggatag

SEQ ID NO: 58 - DNA, 1110 bp, Corynebacterium glutamicum
  source: /note="ncgl1203"
atggcttccgaaacctccagcccgaagaagcgggccaccacgctcaaagacatcgcgcaagcaacacagctttcagtcagcacggtgtcccgggcattggccaacaacgcgagcattccggaatccacacgcatccgagtggttgaagccgctcaaaagctgaactaccgtcccaatgcccaagctcgtgcattgcggaagtcgaggacagacaccatcggtgtcatcattccaaacattgagaacccatatttctcctcactagcagcatcgattcaaaaagctgctcgtgaagctggggtgtccaccattttgtccaactctgaagaaaacccagagctgcttggtcagactttggcgatcatggatgaccaacgcctcgatggaatcatcgtggtgccacacattcagtcagaggaacaagtcactgacttggttgacaggggagtgccagtagtgctggcagaccgtagttttgttaactcgtctattccttcggttacctcagatccagttccgggcatgactgaagctgtggacttactcctggcagctgacgtgcaattgggctaccttgccggcccgcaggatacttccactggtcagctgcgtcttaacacttttgaaaaactatgcgtggaccgcggcatcgtcggagcatctgtctattacggtggctaccgccaagaatctggatatgacggcatcaaggtgctgatcaagcagggagccaatgcgattatcgctggtgactccatgatgaccatcggtgcgttgttggctcttcatgagatgaatttgaagatcggtgaggatgtgcagctcattgggtttgataacaacccaattttccggctgcagaatccaccgctgagcatcattgaccagcacgtacaagagatcggtaagcgtgcgtttgagattctgcagaagctgatcaatggggacaccgcgcaaaaatctgtggtgattccaacgcagctcagcatcaatggatcaacggcggtttcccaaaaggccgccgcaaaagcagcaaaagcagcccaaaaagcagccgcgaaagccgcacagaacacgcaacacgaggtgagcctagatggtgaactctga

SEQ ID NO: 59 - DNA, 639 bp, Corynebacterium glutamicum
  source: /note="ncgl1208"
atgcaattcgcacaaaacccgcgtctgacgaacgacgcggtgatcttagaaccactgtcacatcagtggactcaggatctccaggaagctgtcgcctcacaagaattgtggcgccattggttcgtcgctctacccaccccagagggcatggcggaggaaattgaccgccgcctagccgaacatgcagacggactgtgtgcgccttgggcaatcatttccgctgcaacaggccgtgccgttggcatgacctcatttcatacccttgaccacgcgaataaacggctggaaattggacgcacatggatggctgcccatgtccaaggaaccggcatcaacccctcggtgaaattcctgcagttgcagcgcgcttttgaagacctcggtgtcaatgccgtggaattccgaacgaactggcacaaccaccgctcccgcgccgcaatcgaacgactcggagcaaaacaagacggcgtactacgcaaacatcgcatccaccctgacggcaccgtccgcgacaccgtcatctattccatcaccaacgatgaatggcctgccgtcaaactgacgctcatggagcgactgtaccgtcacatgcaggttcccatcattcccaacgaggcatcgcttttcgacgccagctag

SEQ ID NO: 60 - DNA, 708 bp, Corynebacterium glutamicum
  source: /note="ncgl1261"
atgggacagcaagaaattatcgaggactccaccgagagcggtattaaggttttagaccgcactgtattaatcctcaatgtcatcgcagaacagcctcgatcgttggcagagctcgcagctgccaccgatctgcccagggctacagcccaccgcctcgcctcagcgcttgaggtacacggcatgttggcacgctcccgcgataatagatggaccatcggcgcacggcttgcctcattgggtgcacgcggcgctgacaccctcatcgatacggccgtaccaattatggccgaccttatggagcgcaccggcgaatccgttcagctttatcgcctcaccggcaccacccgcacgtgcgtggccagccaagagcccagctccgggctaaaaaacgtggttcccgtgggcactcgcatgcctttaaatgcagggtcagcagcgcgcgtttttgccgcctacctccccatcccctctgccagcgtcttttcccgcgaggagcttgaccaggtgcgcgccaccggcttagcggagtccgtgggcgagcgcgagctcggccttgctagcctctcctcccctgtttttgattccaacggatccatgatcgcggcactgtccatctccggcgtggccgagcgcctcaagccccaccccgccgccatgtggggcaccgagcttatcgacgccgccgagcgcctaggcgctttgctttaa

SEQ ID NO: 61 - DNA, 1440 bp, Corynebacterium glutamicum
  source: /note="ncgl1262"
atgaccagccccgtggagaacagcacctcaactgagaagctgaccctggcagagaaggtgtggcgcgaccatgtcgtgtccaagggagaaaacggcgagcccgacctcctctacatcgacctgcagctgctgcatgaagtgacctcaccacaggcattcgacggcctgcgcatgactggccgcaaactgcgccacccagaactgcacctggccaccgaagaccacaacgtgccaaccgaaggcatcaagactggctcactgctggaaatcaacgaccagatttcccgcctgcaggtatccaccctgcgcgacaactgtgaagagttcggtgttcgcctgcacccaatgggtgatgtccgccagggcatcgtgcacaccgttggcccacagctgggcgcaactcagccgggcatgaccattgtgtgcggtgactcccacacctctactcacggcgcgtttggctccatggcattcggtatcggtacctctgaggttgagcacgtcatggccactcagaccctgccattgaagcctttcaagaccatggccattgaagttactggcgaactgcagccaggtgtttcctccaaggacctgatcctggcgatcattgccaagatcggcaccggtggtggacaaggctacgttctggaataccgcggcgaagcaatccgcaagatgtccatggatgcacgcatgaccatgtgcaacatgtccatcgaagctggcgcacgtgccggcatgatcgccccagaccaaaccaccttcgactacgttgaaggccgcgaaatggcaccaaagggcgccgactgggacgaagcagttgcttactggaagaccctgccaaccgacgaaggcgcaacctttgacaaggtcgtagaaatcgatggcttcgcactgactccattcatcacctggggcaccaacccaggccaaggtctgccactgagcgaaaccgtgccaaacccagaagacttcaccaacgacaacgacaaggcagcagccgaaaaggcactgcagtacatggacctggtaccaggaaccccactgcgcgacatcaagatcgacaccgtcttcctgggatcctgcaccaacgcccgcattgaagacctgcagatcgccgctgacatcctcaagggccacaaaatcgccgacggcatgcgcatgatggtcgtgccttcctccacctggatcaagcaagaggccgaagcactcggactggacaaaatcttcaccgacgctggcgctgaatgacgtaccgcaggctgctccatgtgcctgggcatgaacccagaccaactgaagccaggcgagcgctctgcatccacctccaaccgaaacttcgaaggacgccaaggaccaggaggccgcacccacctggtatccccagcagtcgcagccgccaccgcaatccgcggcaccctgtcctcacctgcagat

SEQ ID NO: 62 - DNA, 1076 bp, Corynebacterium glutamicum
  source: /note="ncgl1267"
gtgagcaactctaattccggaaaagtccgcgtcgcagtcgtttatggtggtcgcagttctgagcactccgtctcctgcgtctccgctggtgctatcatggcccatctcgatcctgagaagtacgatgtgattcccgtcggcattactgtcgacggcgcgtgggttgttggtgaaaccgatccgcagaagctaactctcatcgatcgcactatgcctgaggtggagcatcgtgaagaggttcgcccaagcctggatcctgcacaccgtggagagttccacttttccgatggcagcctgtatgccaccgctgatgtgattttccctgtgctgcatggtcgttttggtgaagacggtactgtgcagggtctgtttgcactgtctgatattccggtcgttggcccaggtgtgctggcctctgctgcgggaatggacaaggaatacactaagaagctcatggcagcggaaggcctgcccgttggccgtgaggtgattctacgtgatcgtaccgagctgaccgaggcagaaaagaacctgctggtcctgcctgtatttgtgaagcctgcgcgtggtggctcatcgattggtatctctcgtgttactgcgtgggaggattttaataaggctgtggggcttgctcgtgcccatgatgagaaggtcattgtggaatcagagatcgttggctctgaggtggagtgtggcgtgctgcagtatccagacggtcgtatcgtggcgtctgttcctgcgttgctgtctggcaccgaatcaggcgctggcggattctatgactttgataccaagtacttggacaacgttgttactgcagagatcccagcaccgcttgatgagaagaccacggaactgatccagtctttggctgtggaatctttccaggctcttgcgtgtgaaggccttgcccgcgtggacttctttgttaccgccaatggtcctgtgctcaatgagatcaacaccatgccaggatttacccccatttccatgtacccacagatgttcacagcatcaggcgtggcctatgaggaattgctagatgtgttggtgcagcaggcgttgcaccgcga

SEQ ID NO: 63 - DNA, 978 bp, Corynebacterium glutamicum
  source: /note="ncgl1301"
gtgatcgcttatgccggtactactggtacctgtttaaaagtcagccccaacgcctatgttgaagatatggatgtacacgcagatactcgagaattcctcacttcgcgccgcaatcgtctcactccaaaagacgccggattgcctatttaccaaggaaaaaggcgagttccggggcttcgacgtgaagaagtggccatgttggctggcgtgagcgtggactattacacacgtcttgaacgaggcaacttgagtggtgtgtcagaacaggtgttaagcgcgttagctactgccttacagctggatgatgcggagacgcagcatctgtttgatctggccaagctcagtaattcaccggcgtcacggcgtaagcgtacccctgcaccgaagtctgtgctgcgccctgaggtgctgcgaattctcaattcgatgcacgatattccagcatatattcgttctgaaagccgtgaccttctggcagccaacacttttggtcgtgcgctatatgcaccgttgtatgaaagcacggtcgatgatggaattagtggggaaccggggtcaatcaatgttgcacgctttacattcctcgatccagcagcgcgcgaatttttccctgagtgggagagaacttcggcagatttggtagccagcttgcgcaccgttgcagcgcagcggcccaacgacacgttgtttagcaatttgatcggtgagctggtgaccaagtcagaagtcttcgcgcaaatgtgggccgaccataatgtccgcatgcatcgaacaggttccaagaagatcgtgcacccgttggtgggggagatggagctggattttgaaacgcttgatcttccagcagatcccaatattgctctcgtggtgtactccgctgcggaaggttcgacatctgcaatgaaccttcaacttctggccaattggacaggtaatgacagcccctccctcagcacagaacttggtgacactatttaa

SEQ ID NO: 64 - DNA, 915 bp, Corynebacterium glutamicum
  source: /note="ncgl1320"
atgatccgcaaacttgctcgaccaatgcttgcatcggtctacgtcgcagatggcgcagaatcagtattgaacaccagcgcacacgtcgaaggcactcaggtagttctggatcgtatccgttatgtgctgccccgtaagtacgcaaagcgcatttccagagatccagaattggtcacccgcgtcattggcggcaccaaagtcggtgcgggttctttgctagctattggtcgtgcaccacgcacctctgcagctaccctcgcaatcctgactatccctaacatcctggctcgcaatgcgttctgggaaacccaggatgcggatgaaaaacgtaaccgccgcaacggtttcctcaccaacattgccctgattggtggcctgtttatcacttctgttgatactgagggcaagcctggcgtgaagtggcgtgcaaccaatgctgcaaagcgtggcaagaagcagctgcagcaggcacttccaaccaaatctgagactgaaaagttcggtgagaaggcctctgattggttcaacgatacttctgacaaggtcaccgagtacgcgtacaccgctcaggattttgtcggtgagaacaaggacgactggatcaagtccgcaaccgagactgctcacaaggtcgctgatactgtgagcgattacgctcacaaggctacctcttaccttgaggagaacagcggtgactggcttgaggctgcgcaggctaacgccaagactgctcgtaagtctgcagtgaaggctgccggcaaggctcaggaaaaggctaactttgctcttcaggtcgcagaggaaacctctggtcgcgccaacaagaaggcaactaagagctacgacaagcttcagaagcaggctgataaggccatcgatcgtgcacagaagaagctgaagggcatcgaactttaa

SEQ ID NO: 65 - DNA, 2850 bp, Corynebacterium glutamicum
  source: /note="ncgl1322"
ttggctgatcgcctcgtagtgcgcggagcgcgtgaacacaacctaaaaggcgtggatattgatctgccacgcgactcgatggtggtgttcaccggcctgtcaggttccggtaaatcatcactggcctttgacaccatctttgcggaaggccagcgccgttacgtggagtcgttgtccagttacgcccgcatgttcttggggcagatggacaagccggacgtggatttgattgatggattatccccagcggtctccattgaccaaaagtccaccaaccgcaaccctcggtccaccgtcggtaccatcacggaagtctatgactacctgcgtcttctgtatgcccgcgctggtaccgcacactgcccagtgtgtgatgcccgcgtggagcgtcaaaccccgcagcagatggtggaccagatccttggcatggaggagggactgaagttccaaatccttgcgcctgtggtgcgtacccgtaaaggtgagttcgttgatcttttcgcagatcttgcatcccaaggttattcccgcgtgcgggttgatggggaagtgcaccagctctcggatcctccaaagctagaaaagcagatcaagcacgatattgatgttgtggttgaccgtctgcaggtaaaagccagccaaaagcagcgcctgacagactctatggaaaccgcacttcgcctggccgatggcgtggctgtgctggagttcgttggcctggaggaagatgatccgaataggcttcgtcgattctctgaaaagatgagctgccctaacggtcacgcgttgacggttgatgagctggagcctcgtgctttttccttcaactctccttatggcgcgtgtcctgcctgtgatggcttgggtgtgcgcaccgaagttgatattgatctgatcatcccagatccagatgcacctgcaactaaagcggttcagccctggaactccagcccaaaccactcttactttgaaaagctcattgaaggcctggcgaaagccctcggatttgatccggaaactccgtacagtgagctcaccgcagctcaaaagaaggctctggtctatggatcgaaggaagaagtaagcgttcgatacaagaaccgctacggacgcgtgcgttcttggactgcgccttttgaaggtgtcatgggctactttgatcgcaagttggagcagactgattccgaaacccaaaaagaccgactgttgggctacacccgtgaagtgccctgcccaacctgtaaaggcgcacgcctcaagccggaaatcttggccgtacgcctagactccggaagccatggagcgttgtccattgctggactaaccgcgctgtcggtgcatgaagcattcgagtttttggataacctcacactgggcaagcgcgaggaaatgatcgcgggagctgtgctgagggaaattcacgcccgcctgaaattcttgcttgacgtgggcctttcctacctcacccttgatcgcgccgcaggcaccctgtctggtggtgaagcgcagcgtatccgcctggctactcaaattggttccggtctggctggtgtgctctacgtcttggatgagccatccattggtctgcaccaacgtgacaaccagcgcttaatcactacccttgagcatctccgagatatcggaaacacactcattgttgtggaacacgatgaagacaccatcaggcgcgcagattggctcgtggatattggtcctcgagctggtgaatttggtggtgaagtggtctaccaaggtgagccgaagggcattttggactgcgaagaatccctcacaggtgcttacttgtctggtcgtcgaaccctgggtgttcctgatactcgccgtgagatcgacaaagagcgacagctcaaggtggttggtgctagggaaaacaacctgcggggcatcgatgtgaaaatcccactgggtgtgctgtgctgcatcactggtgtgtcgggatctggtaaatccacgctggtcaatcagattttggccaaggttctggccaacaaactcaaccgcgcacgccaagtgcctggtcgcgcaaagcgggtggaaggcctcgagcacttggataagttggtccaggtggatcagtcgccaattggtcgtactccacgttcaaacccagcgacgtacacgggtgtgtttgataaagtccgtaacctttttgccgagaccactgaagcgaaggtccgcggttacaagcctggccgcttctccttcaatattaagggtggacgctgcgaagcatgtcagggcgatggcacgctgaagatcgaaatgaacttcctgcccgacgtgtatgttccgtgtgaagtctgtgatggtcagcgctacaaccgcgagaccctcgaggtgaagtacaagggcaaaaacatcgctgaagtattgggcatgccgatctctgaggctgcggacttctttgagcccatcacctcaattcaccgatacctagcaacgctggttgatgtcggccttggctatgtccgtttgggccaggcagcaacaaccttgtctggtggtgaagcccagcgtgtgaaacttgccgctgagctgcagaagcgttccaacggtcgcaccgtttacatcctcgatgagccaactactggtttgcactttgaagatattcgcaaactcatgatggtgatccaaggcctggtggacaagggtaactccgtgatcatcatcgagcacaacctcgacgtgatcaaggctgccgactggatcgtggacatgggtccagaaggcggaagcggcggtggaactgtggtcgctgaaggaaccccagagcaagttgctgaagttgcgggttcctacaccggccaattccttaaagagttgttgtag

SEQ ID NO: 66 - DNA, 915 bp, Corynebacterium glutamicum
  source: /note="ncgl1364"
atgaaggctcgcgttttagcgaaaacatggctgacacatttggccgtggagcgtggcttgtcggcaaatacgctgagtaattatcggcgcgatgtggaacgctattgcgactggctcgaggcggctgggctggacgatattcgagatatcaccactgcgaatgttgagagttatgtcaaggatctgcgccgcgggattgatggacaacaagcgttgtctgcgtcctcggcaggtcgcgcgctcatcgtcgcgcgcgggttgcacaagtttgcgttgatggagggcgaggtagctgcggacgttgcggctgatgtgtcgccaccggccatgggccggcatttacctgacacgctcagcatcaacgaggtagccctgcttatcgacgcgatcccacattcagatatcgccactcccgttgatctccgtgaccgagcgctggtggaattgctttatggaactggcgcgcgtatctctgaggcgattgggctggcagttgatgatgtgtcggaaatgcctgaagtactgcgcatcacgggtaaaggttccaaacaacggatcgtgccttttggttcgatggcacaacaagcggtccgggaatatttggtcagagccagacccgcgttgagtaaggggaaaagccatgcgctttttctcaaccaacgcggcggtccgctatctcggcaatctgcgtgggcagtgctgaagaaaacggttgagcgcgcaggtttagataaagatatttctccccacaccctgagacacagcttcgccacccatctcctcgaaggtggcgccgatgtccgtgtggtgcaggaactcctgggtcattcttctgtgacgaccactcagatttacacgcacatcacagccgatagcttgcgggaagtgtggcgcggggcccatcctcgtgcgtga

SEQ ID NO: 67 - DNA, 873 bp, Corynebacterium glutamicum
  source: /note="ncgl1366"
gtgagtgatgcagggaagaaggactcttccaaggtggagatcggactgaccggtcgacccctgcgcgagttgcctgagccatctcctttggaaaaacatggcccagcaacgatcattgccatggcgaatcaaaaaggtggcgttggtaaaaccacgtccaccatcaacctcggagcatgccttgcagaggcgggacgtaaagtcctgctcgttgacttggatccgcaaggtgcgttgactgctggtttgggaatccactacgacgacgtggatatcaccgtgtatgacctcatggtggacaacaattccactattgatcaggcgatccaccacactggtgttcctgatctggatgtcgttcctgcaaatattgacttgtccgctgcagaaattcagctggtcaatgaagttggtcgtgaacaaacacttgccagggcgctgcgtcctgtcatgaaggactacgacttcatcatccttgattgtcagccatcacttggtcttttgacggtgaacgctttggcgtgcgcgcacggggttatcatcccgatggagtgcgagtacttctcactgcgtggcctcgcattgctcactgacacggtggaaaaagttgccgatcggttgaacttcgatctggaaatcctcggcatcttggtcactatgtttgaccgacgcacctctcacgccagggaagtgatgtcacgagttgttgaggttttcgatgagaaagtgttcgatacggtaatcacccgaaccgtcaggttccccgaaacttctgttgccggtgagccgatcatcacatgggcaccaacatcacaaggtgcggagcagtaccgttccttggcgcgtgaagtgatcagccgcgtcaacgactag

SEQ ID NO: 68 - DNA, 963 bp, Corynebacterium glutamicum
  source: /note="ncgl1371"
gtgaccccacccgctcgccgagatggcacaccggacaagaagcagagcaatcgctctggcggataccggtcttcagttcgtggctacaagccaggatcatcccgcccaaacacacgccaacagcctcagaagaaggatgagattcttctctccaacgctaagcctgccaagaagcaaaacgtaaaatccgacgacgattggtcgatgggtttcttaaaccgcaatgactctgacggagttcgcctgcagaaggtgcttgcccaagcaggtgtggcatcacgtcgacacgcagaaatcctaattgatcagggccgtgtggaggtcaacgatcgtatcgtgactacccagggcgtgcgcgtggatccaaacaacgatgtcatccgtgttgatggcgtccgcatccacatcaacgaggacctcgagtacttcgtgctcaacaagcctcgtggcatgcactccaccatgagcgatgaacttggtcgcccatgcgtgggtgatctggtcagtgagaagactgcatctggacagcgtctgttccacgtcggtcgcctcgacgcggacaccgaaggtttgctgctgctcaccaacgatggtgagttggctaaccgcctcatgcaccctaagtacgaagtgtccaagacttaccttgctaccgttcgcggtgaagcaaccaataagctagtcagcgctcttcgtgatggcgtggagttggaagatggccctgccaaggctgactttgcgcagattatcgacgtattccagggcaagtccttgttgcgcatcgaaatccacgaaggccgcaagcacattgtgcgacgcctcttcgatgagctcggtttcccagtcgagcgcctcgtgcgcaccaagctgcacaccgttcagcttggtgatcagaagccaggttcccttcgtgcactgaactcctctgagctgaccagcttatacaaggtggtccaactgtga

SEQ ID NO: 69 - DNA, 711 bp, Corynebacterium glutamicum
  source: /note="ncgl1372"
gtgacggaaatttccaacatgcctgccggtggcctcatcgtagccatcgacgggccgtctggcaccggaaaatccaccacatcccgcgcgctcgcaacccgtctctcggccaagtacctagatactggtgcgatgtaccgcgtcgcaacgcttcatgtgcttaaccaggggattgaccctgcagatagcgcagccgtgatcgctgcaaccgctgtattgccgttgtcgatttctgacgatcccgcctccactgaggtgttgctcgcgggcgtcgatgtgcaaaaggacatccgcggaccagaagtcacccaaaatgtctccgcagtgtccgcgatccctgaggttcgtgaaaacttggtggcgttgcagcgcgcactcgccgccaaagcacatcgctgcgtcgtcgaaggcagagacatcggaacagcagtgcttgtcgacgcgcccatcaaggcgtttctcaccgcctcagcggaagtccgcgcccagcgacgctttgaccaagacaccgcagcaggtcgcgacgtagatttcgacgctgtgctggcagatgttgttcgccgcgatgaactagattccacccgtgccgcctcaccgctgaaaccagcagatgatgcacacatcgtggacacctcagatatgaccatggatcaagtacttgatcacctcatccacctagtggaagcctccgctgaaaggagcaaccagtga

SEQ ID NO: 70 - DNA, 1263 bp, Corynebacterium glutamicum
  source: /note="ncgl1457"
atgcaatcttggcctacacctgaagtacctgctctccctggcacgcctgtgcctttggaattgttcgacactgcagatcaggaagtacgcctggttgaaaccccacctgccggatccgacacaccggttggcatgtacgtctgtggcatcactccctacgactccacacacttggggcacgcggcgacatacctcgctttcgatctgatctaccgcatcctgctggacaatgatcacgatgtccactacgtccaaaacatcaccgatgtcgatgaccctctgtttgaacgcgcagcccgcgacggcgtcgactggcgcgacctcggcaccagccaaatcaatctcttccgcagcgatatggaagccctgagcatcattccgccgaaggactacatcggtgcgattgagtccatcgacgaggtcattgagatggtcaagacgcttctcgacgaaggcgccgcatacatcgtcgaggacgccgaatatccagatgtctacgcatcaatcaacgccacagacaaattcggctacgagtccaattacgacgcagcgaccatggctgagttcttcgcagaacgcggcggtgacccagagcgtcccggcaagaaaaaccctatggacgccctcctgtggcgtgcagcccgcgaaggcgaaccaagctgggaatccccattcggcgcaggtcgccctggctggcacatcgagtgttcagcaatcgctaccaaccgactaggccacagctttgatatccaaggtggcggctctgacctgatcttccctcaccacgagttctccgcagcgcacgccgaagcagctcacggtgtcgagcgcatggctaagcactacgtccacgctggcatgatatcccaagacggcgtgaaaatgtccaagtctttgggcaacctggaatttgtttcccgactcaccgctgcaggccatgagcccggcgcgatccgccttggtgtttttgcaaaccactaccgtggcaaccgcgattggaacgcagagagcctcgccaccgcagagcagcgcctggcaacctggcgtgaggcagcacgagctgcaaccaatagggaagacgccattgcagttgtggagcagctccgtgcgcatctatctgctgaccttgataccccgggcgcgctcgcagcggtagataattgggcagcgggtatcgacaccacggcaggttcaaaagagttcaccgaggtcggaaacatcgtggtcgcagccattgatgccctcctgggcgtgcagctctag

SEQ ID NO: 71 - DNA, 759 bp, Corynebacterium glutamicum
  source: /note="ncgl1484"
atggtttcagttcttttagttcagccccgtcagggagaagcagtcgccgcagctgagcgacgtgactttttgcaggccaccggccttaagcctcaagaactgacctcccgaatgttggataccaccacttctcgaattggcagtctggaaggtttcgacggcgtgattgtgggcggaagcccactgaatgccaccaactttgagtacagcgattggcaacgccacgtccaccgcgaattgtccctgctgatcaatcacccactgccaacaatctttgtctgctacggcaatacctttttgaccttcttctctggcggacagattggtcgcacacaccccgaagattccggcgccaccacagtgttgctaactgacgccggcaaacgagacgtactcactcaagacctaccggatagctttacgtcctttactggtcacacggaaaactccgtagcgcccgcccctggacacgtggtgttggcaacgggaccaacctgccccatccagatgctgcgcgccaacaagaacacctggtcagttcaattccatgcagatatggatgccgtaggcatgaaaaaccgcatggatttttactccaactacggctacttctccccagaagattatgaccgcatcattgcagagctaccctctgttgactccatttatgccaacagggtgctccgcaacttcgtggaggtctgcgaaggaattcgtgttgctgatggtgctgagcaccaactcccagagcttaactaa

SEQ ID NO: 72 - DNA, 1266 bp, Corynebacterium glutamicum
  source: /note="ncgl1500"
atgtccgatttcctcaatgcagatggatccctcaatgtggataaggtgcgggaagaattcccaatcctgaagcgcactgttagggatgggaaaccgcttgcttacctggactcaggtgcgacatcgcagcgacccgagcgggtgtggcgtgcagaggagcactttgtgctgcacaccaacgcccccgtgcaccgcggtgcctaccaactggctgaggaagcaacggatgcttatgaaggtgcccgcgagaagatcgctgcctttgttggtgccgagcagcatgaaattgcgttcactaagaatgcaactgaagcactcaatcttgttgcgtacaccttgggtgatgaccgttccggtaagtatcgtgtccaggccggcgataccgtggtcatcacggagctagagcaccacgcaaacttggtgccatggcaggagctgtgccgtcgaaccggtgcgacattgaagtggtacaaggtgactgaagatggtcgcattgatctcgattcactcgagcttgatgaaactgtcaaggtcgttgccttcactcaccagtccaatgtgaccggtgctgtggctgatgttccagagttggttcgtcgtgccaaggctgtcggcgctctcacggtgcttgatgcgtgccagtctgttcctcatatgccagtgaatttccacgagctggatgtagatttctctgcattctctggccataagatgctgggacctgcaggcgtgggcgttgtgtatgcaaagtccccaatcttggatgaactgccaccatttttgactggtggttccatgattgaagttgtcaccatggagggttccacctacgctgccgcacctcaacgttttgaggccggcacgcagatgaccagccaggttgtgggcttgggtgctgccgtggacatgctgaatgaaatcggtatggaagcaatcgcagcgcatgagcacgcattgactgcttacgcgttggaaaagctcacggcaattaagggactaaccattgctggtcctttgactgcagagcagcgcggcggtgcaatcagcttcggtgtcgagggcattcacccacacgatctaggccaagtgcttgacgatcagggcgtgaatatccgcgtcggccaccactgcgcgtggcccgtgcaccgcagcatgaacgtacaatcgacagcaagagcatctttctatctctataacaccttcgaagaaatcgaccgcctcgcggcagcgattgagaaggccaagcaattctttggagttgagtaa

SEQ ID NO: 73 - DNA, 1446 bp, Corynebacterium glutamicum
  source: /note="ncgl1503"
atgacttcggcaacgacgaacccaggggttaacgagcccttgaccgatgaccagatcattgaatccatcggtccgtacaactatggttggcacgactccgacgacgctggtgcatccgcacagcgtggtctcagcgaggatgtcgtacgcgacatctctgcgaagaagagcgagccagaatggatgcttcagcagcgcctcaaggccctgagcatttttgataagaagccagttccaacctggggtgcagacctttcaggcattgacttcgacaacattaaatacttcgtccgctccaccgagaagcaagcacagtcctgggaggatctcccagaagacatcaagaatacctacgacaagctgggtattcctgaggccgagaagcagcgcctcgttgcaggtgttgcagctcagtacgagtctgaggttgtctaccaccagatccgcgaggacctggaggaaaagggagttatcttccttgacaccgataccgcactgaaggagcaccctgagatcttccaggagtacttcggcaccgtcattccagcaggcgacaacaagttctccgcactgaactccgctgtctggtccggtggatctttcatctacgtgccaaagggtgtccacgtggacattcctctgcaggcttacttccgcatcaacaccgagaacatgggtcagttcgaacgcaccctgatcatcgttgatgaggatgcctacgttcactacgttgagggctgtaccgcacctatttacaagtccgactccctgcactccgcagtcgttgagatcatcgtgaagaagggtggacgctgccgctacaccaccattcagaactggtccaacaacgtctacaacctggtgaccaagcgcaccaaggttgaagagggcggcaccatggaatgggtcgatggcaacatcggctccaaggtcaccatgaagtacccagctgtctggatgactggcccacacgcaaagggcgaagttctctccgtcgctttcgcaggtgagggacagttccaggacaccggcgccaagatgacccacatggctccttacacttcctccaacatcgtgtccaagtctgtggcacgtggcggtggacgtgcggcttaccgtggtctggttcagatcaacgcaaacgctcaccactcaacctccaacgttgagtgtgacgcactgctggtcgatgacatctcccgttctgacacctacccatacaacgacatccgtaacgatcacgtgtcactcggccacgaggcaactgtttcccaggtttctgaagagcagctgttctacctcatgagccgcggacttgcggaagaagaagcaatggcaatgatcgttcgtggcttcgttgagccaatcgctaaggaactcccaatggagtacgcccttgagctcaaccgactgatcgaactgcagatggaaggatcggtgggctaa

SEQ ID NO: 74 - DNA, 1041 bp, Corynebacterium glutamicum
  source: /note="ncgl1508"
gtgtctacttcagttgctccctcaaataatccagttgagttgaagcccattactttctgggcaccgaccatcaaagtgcagcgcattctcgcgctcctactgttgattttccagggaggcatcaccgttacgggctctatcgtccgtgtcacaggctccggcctcggttgtgatacctggccactatgccacgaaggttcactagtcccagtcgcaggcgcagcaccatggatccaccaggcagtggaatttggtaaccgcatgctcactttcgtgcttgctgccgcagcgcttgcgttgttcattgcagttcttggcgcaaaacgccgccgcgagatcctggtccattccttcatccagggtctgggcatcatcttgcaggctgtcatcggtggcatcaccgtgcttgttgatctgcactggtacgccgttgccttgcacttcctgccatccatgatccttgttttcatggccgcgattttgtacacccgcatcggcgagcccgatgacggcgagattaccaccacattccccacgtggatccgcaatgtagctgtcattggtgcagtagcgctctccgtagtgttgatcaccggcaccatgaccaccggtgctggcgttcactctggcgatgcatcaatcaccatggatgatcgcctcgatgtcagcatcgacttgatggcccacatccacggctacagcatgtacatctacctcttcttcaccctcatcgtggtcgccggtctgtacaaggcaaaaaccaccaagcacaacaagcagcttggcctcatgctgattctgttcattctgattcaggcaggtatcggcatcttgcagtaccgcatgggtgtgcctcgctggagcatcccattccacatcgcaatgtcttccgtagttgtggccttcacttcccttctgtgggcgcagggtcgcatacgcgtcggcggtaaagccaccgttactggttctgttgatggcgatattaagaacgagatcattacgaacccctttgagaagaaatcaaagcagcctgttaaataa

SEQ ID NO: 75 - DNA, 972 bp, Corynebacterium glutamicum
  source: /note="ncgl1511"
atgagtgatttgaaaatgcaacgttctggaggagaacccttggacacgatcaaggcctatattgcgctaacgaagcccagggttattgaactcctccttgtcgccacaatccccacaatgcttcaggctgaacgcggtgagaacaacattgtgctcatcttgctgactgtgttcggtggctggatgggtgcggccgccgccaacaccttcaacatggtggcagactccgatattgatcagcgcatgggacgcactagggctcgccctttggtgcgccacaccgtgagtaatcgcgacgcctccatttttgcgtgggtcctgacagtggccagcttcttgtggctgtggctgctgtgcgattcgatgctcgccggcatcttcgtgttgatcacgattttcttctacatttttgtctacaccaagtggctgaagcgccgcacgcacatgaatatcgtgtggggcggagccgcaggttgtatgccagtgctcgtcggctgggcagtgatcgttgatcagtttgagccaggcgttccacagcagtggtggcaggcaattgtcctgttcatggtgattttcttctggaccccacctcacacctgggctctggccatgaagtaccgcgaagactacaaggcggctggcgtcccaatgcttcctgtcgtgcgcaccccagtccaggtcaccgcacaaatcgtgtggtactccgtggcaactgtgctgaccaccttcttgctcatcccagcaactggttggatctacgcagcgatcgccgtcatttccggcgtcaccttcttgttcatggccatcaagctgcacctcggcatcaaaaacggcggcaaggtcaagcctctgaagctttttattttgtccaacaactacttggcagtcctcttcgtggcattgtccgtcgacgcggtcctcggccttgagaccatcggcgagatgctcggctggaccaccacctttttctaa

SEQ ID NO: 76 - DNA, 321 bp, Corynebacterium glutamicum
  source: /note="ncgl1545"
gtggcccttccacagttgactgatgagcagcgcaaggcagctcttgctaaggcagcagaggcacgcaaggcacgcgcagagctcaaagagaacctgaagcgcggcaacactaacctcagggaagttctggacaaggctgagtctgacgagatcatcggcaagaccaaggtctccgctctcctcgaggctctccctaaggttggcaaggtcaaggcaaaggagattatggacgagctgggcattgctcagacccgtcgtcttcgtggactgggtgaccgtcagcgtcgcgcacttctcgagcgtttcggcttcgaggattaa

SEQ ID NO: 77 - DNA, 939 bp, Corynebacterium glutamicum
  source: /note="ncgl1550"
atgaagcacctcctatccattagcgatctttccaaagatgagattgttggattgctggatgaagcggatcgctttaaggaggtgctcgaaggacgtgaagtaaagaagctgcccacgctgcgtggtcgcaccatttttaccttgttctatgagaactccacgcgcacccgttcgtcctttgaaaccgcaggaaagtggatgagcgccgatgtgattaacatttcggcctcatcatccagcgtgaagaagggcgagtcgctgaaagataccggcttgactttgtcggcaatcggcgcggatgcgatcatcatgcgccacccagcctcaggcgccgcgcagcagcttgcgcagttcgtcgcaccaggcggcaacggccccagcgtgatcaacgcgggtgacggttcgcaccagcaccccacccaggcgcttctcgacgctttaaccatccggcagcgcaccggccgcattgagggactcaaagttgtcatcgtgggcgactgtttgcactcccgggtggtgcgctccaatgtggatctgctgtccactttgggcgcagaggtagtgctggttgctcctccgacactgcttcctattggtgtggagaactggccagtccgattctcctacgacatggacgcagaaattgccgacgccgacgtagtgatgatgctgcgcgttcagcaagaacgcatgcagggtggtttcttcccctcacaccgtgagtacgcaacgctgtacggcatgtccaaagagcgcgaagctcgcctcaaggactccgccatcatcatgcaccccggccccatgcttcgtggcatggaaatcaacttccaggtggcagacgcaccacgcaccgcggtactgcagcaggtaagcaacggtgtgcacatgcgcatggccattttgttcgccctagtcgcaggctctgacgcgactatctaa

SEQ ID NO: 78 - DNA, 1350 bp, Corynebacterium glutamicum
  source: /note="ncgl1583"
atggctatcagtgttgttgatctatttagcatcggtatcggaccatcatcctcacataccgtcggccccatgagagccgccctcacgtatatctctgaatttcccagctcacatgtcgatatcacgttgcacggatcccttgccgccaccggtaaaggccactgcactgaccgggcggtattactgggtctggtgggatgggaaccaacgatagttcccattgatgctgcaccctcacccggcgcgccgattcctgcgaaaggttctgtgaacgggccaaagggaacggtgtcgtattccctgacgtttgatcctcatcctcttccagaacaccccaatgccgttacctttaaaggatcaaccacaaggacttatttgtcggtgggtggtgggttcattatgacgttggaggatttccggaagctggacgatatcggatcaggtgtgtcaaccattcatccagaggcagaggtgccttgtccttttcagaagagttcccaattactcgcatatgggcgcgattttgcggaggtcatgaaggataatgagcgcttaatccacggggatcttggcacagtggatgcccatttggatcgagtgtggcagattatgcaggagtgcgtggcacaaggcatcgcaacgcctgggattttaccgggtgggttgaatgtgcaacgtcgggcgccgcaggtacacgcgctgattagcaacggggatacgtgtgagctgggtgctgatcttgatgctgtggagtgggtgaatctgtacgccttggcggtgaatgaagaaaacgccgctggtggtcgtgtggttactgctccgactaatggtgctgcggggattattccggcggtgatgcactatgcgcgggattttttgacaggttttggggcggagcaggcgcggacgtttttgtataccgcgggtgcggtgggcatcatcattaaggaaaatgcctcgatctctggcgcggaggtggggtgtcagggtgaggttggttcagcgtccgcgatggcggctgccgggttgtgtgcagtcttaggtggttctccgcaacaggtggaaaacgccgcggagattgcgttggagcacaatttgggattgacgtgcgatccggtgggcgggttagtgcagattccgtgtattgaacgcaacgctattgctgccatgaagtccatcaatgcggcaaggcttgcccggattggtgatggcaacaatcgcgtgagtttggatgatgtggtggtcacgatggctgccaccggtcgggacatgttgaccaaatacaaggaaacgtcccttggtggtttggcaaccaccttgggcttcccggtgtcgatgacggagtgttag

SEQ ID NO: 79 - DNA, 2061 bp, Corynebacterium glutamicum
  source: /note="ncgl1607"
gtgaacaccacagataccgcagtagcaaaccttgttgtttttgaggtccctgcaggcaccgcaattggtgcagcaatgcgcgaactagatctgcccaacaagggtccagaggctatcgtttgtgcaaaagacgctgaaggccaactaaaggatctttcacacgtcccagaaaccactgctacgttcaccgctgtacctgcaaatactgatgacggccgcgcagtaatccgccactcgtgcgctcacgtgctggcacaggctgtccaggcagaattcccaggaaccaagttgggcatcggcccagccattgaaaatggtttctactacgactttgatgtggctgagcctttcactccggaagatctcaagaccattgaaaagcggatgaagaagatcatcaagaccggccagaagtttgagcgccgcgtctatgaatccgctgaagctgcagcggaagagttgaagaacgagccttacaagctggaacttatccaggacaagggcaacgttgatcctaactctgatgaagccaccgaagtgggcgcaggcgaactgaccgcgtatgacaacgtcaaccctcgcaccagtgaggtggagtggtctgatctttgccgtggaccacacattccaaccacccgctacattccagcattcgcgttgactcgttcgtctgctgcgtactggcgtggcgatcaagacaacgctggcctgcagcgcatctatggtaccgcgtgggaggataaggaatccctcgatgcctaccagaccatgctcgctgaggcagaaaagcgcgatcaccgccgtctaggcaccgaacttgatttgttctccttcccagatgatctgggctctggtctgccagtattccatcccaacggtggcatcgtgcgcaatgagatggaagatcactcccgtcgccgccacatcgcagccggctactcctttgtgaacaccccgcacatcaccaagcaggatctctttgagcgttccggtcaccttggtttctacaaggatggcatgttccctccaatgcaggtggatgcggagttcgacgaagacggcaatgtgaccaagccgggccaagagtactacctcaagcccatgaactgcccaatgcacaacctcatcttcgattctcgtggacgttcttaccgtgagcttccactgcgtctttttgagttcggcaacgtctaccgctacgaaaagtccggtgtgatccacggcctgacccgtgcccgtggcttcacccaggacgatgctcacatctactgcaccgaggatcagctggaagcagagctcacctctgtactggacttcatcctgtcgctgctgcgtgactacggtttggatgatttctacctggagctctccacccgcgatcctaagaagtcagtcggttctgatgagatctgggagcgttccactgaaatcttgaaccgtgttgccaccaattctggcctggaacttgttccagacccagaaggtgccgcattctacggccctaagatttctgttcaggcacgcgacgcgattggccgtacctggcagatgtccaccgtgcagctggacttcaacatgcctgagcgcttcaacttggaatacacctcatctgatggttccaagcagcagcccatcatgatccaccgcgcactgtttggttccatcgagcgcttcttcggcgtgttgttggagcactacgctggtgctttcccagcatggctggcacctcaccaggtcatgggtattccagttgctgatgattgcattccacacctggagacaatcaccgctcagctgcgtgaaaagggtatccgcgcagacgtggacacctccgatgatcgcatgcagaagaagatccgcaaccacaccaccggcaaggttccattcatgctgcttgccggtgcccgcgatgtggaagcaaacgcagtgagcttccgtttcttggacggcacccaggtcaacggcgtgcccgtcgatgaggcaatcgctgtgatttcttcctggattggtgaccgcatcaatgatcagccgagcgaggactccattgcagctcgcaggtag

SEQ ID NO: 80 - DNA, 762 bp, Corynebacterium glutamicum
  source: /note="ncgl1855"
atggcaatcgaaaagaagccagcaggtgcacgaggcagtcgcggtagccgcacagttaagaccttgcccaacggaaaaccagatccagcaagtttgtcagataggcagcgcaggattttagaggttatccgagatgctgtggttttgaggggttatccaccaagcattagggaaattggtgatgctgcaggacttcaatccacttcttccgttgcttaccagcttaaagagctagagaagaagggcttcctgcgcagggaccctaataagcctcgcgcggtggatgttcgccaccttccagaaactgaaagccgttcctccaaggctgctacacaggcaaagagcaaggcccctcaggccggggtccatgatcctgagttagctggccagacctcatttgtcccagtggtgggcaaaattgccgctggtagcccgatcaccgctgagcagaacatcgaagagtactacccactccccgcagaaatcgtcggagacggtgacttgttcatgctccaggttgttggcgagtccatgagggatgctggcatcctcaccggcgactgggttgttgttcgttcccagccggtagctgagcagggcgagttcgtcgcggcaatgattgacggtgaagccaccgtgaaggaattccacaaggattcatctggcatctggctcctgccacacaacgatacgtttgccccaattcctgctgagaatgcagaaatcatgggcaaggttgtttccgtgatgcgcaagctttaa

SEQ ID NO: 81 - DNA, 1707 bp, Corynebacterium glutamicum
  source: /note="ncgl1858"
gtggctactgtggctgatgtgaatcaagacactgtactgaagggcaccggcgttgtcggtggagtccgttatgcaagcgcggtgtggattaccccacgccccgaactaccccaagcaggcgaagtcgtcgccgaagaaaaccgtgaagcagagcaggagcgtttcgacgccgctgcagccacagtctcttctcgtttgcttgagcgctccgaagctgctgaaggaccagcagctgaggtgcttaaagctactgctggcatggtcaatgaccgtggctggcgtaaggctgtcatcaagggtgtcaagggtggtcaccctgcggaatacgccgtggttgcagcaacaaccaagttcatctccatgttcgaagccgcaggcggcctgatcgcggagcgcaccacagacttgcgcgacatccgcgaccgcgtcatcgcagaacttcgtggcgatgaagagccaggtctgccagctgtttccggacaggtcattctcttcgcagatgacctctccccagcagacaccgcggcactaaacacagatctctttgtgggacttgtcactgagctgggtggcccaacaagccacaccgcgatcatcgcgcgccagctcaacgtgccttgcatcgtcgcatccggcgccggcatcaaggacatcaagtccggcgaaaaggtgcttatcgacggcagcctcggcaccattgaccgcaacgcggacgaagctgaagcaaccaagctcgtctccgagtccctcgagcgcgctgctcgcatcgccgagtggaagggtcctgcacaaaccaaggacggctaccgcgttcagctgttggccaacgtccaagacggcaactctgcacagcaggctgcacagaccgaagcagaaggcatcggcctgttccgcaccgaactgtgcttcctttccgccaccgaagagccaagcgttgatgagcaggctgcggtctactcaaaggtgcttgaagcattcccagagtccaaggttgttgtccgctccctcgacgcaggttctgacaagccagttccattcgcatcgatggctgatgagatgaacccagcactgggtgttcgtggcctgcgtatcgcacgtggacaggttgatctgctgactcgccagctcgacgcaattgcgaaggccagcaaagaactcggccgtggcgacgacgccccaacctgggttatggctccaatggtggctaccgcttatgaagcaaagtggtttgctgacatgtgccgtgagcgtggcctaatcgccggcgccatgatcgaagttccagcagcatccctgatggcagacaagatcatgcctcacctggactttgtttccatcggtaccaacgacctgacccagtacaccatggcagcggaccgcatgtctcctgagcttgcctacctgaccgatccttggcagccagcagtcctgcgcctgatcaagcacacctgtgacgaaggtgctcgctttaacaccccagtcggtgtttgtggtgaagcagcagcagacccactgttggcaactgtcctcaccggtcttggcgtgaactccctgtccgcagcatccactgctctcgcagcagtcggtgcaaagctgtcagaggtcaccctggaaacctgtaagaaggcagcagaagcagcacttgacgctgaaggcgcaactgaagcacgcgatgctgtacgcgcagtgatcgacgcagcagtctaa

SEQ ID NO: 82 - DNA, 1126 bp, Corynebacterium glutamicum
  source: /note="ncgl1880"
atggctcccaagaagacagcaacaaaggcaactgccgccaaggggaatgatcgtcagaaggcacttgatgccgcactagccctgattgagaaggatttcggtaaaggcgctgtcatgcgtctgggtgatgagaatcgtccgccaatccagaccatctcatctggtaacaccgcgattgatattgccttgggtatcggtggattcccacgtggtcgaatcgttgaggtgtatggcccagaatcatcaggtaaaaccaccgttgcactgcacgctattgcgcaggcacaaaaggccggtggcatcgctgcattcattgacgccgagcacgcgttggatccagattatgctcgcaagcttggtgtagatactgatgcgcttctggtttcgcagccagacactggtgagcaagcactagaaatcgccgacatgctggttcgttccggcgcaatcgacatcatcgtgattgactcggtggctgcgctgacaccaaaggctgaaattgaaggcgaaatgggcgatagccacgttggtcttcaggcccgcctcatgagccaggcgcttcgtaagatgacaggtgcgctgtacaactcgggtaccaccgcgatcttcattaaccagctgcgtgaaaagatcggtgtgatgttcggttccccagaaaccaccaccggtggtaaggccctgaagttctacgcatctgttcgttgtgacattcgacgaatccagactctgaaggacggacaggatgccattggtaaccgcacccgcttgaaggtcgttaagaacaaggtctccccaccgttcaagatcgctgaattcgacatcatgtacggcgaaggcatctcccgtgaatcctccgtcattgacttggcagtggacaacggcattgtgaagaagtcaggttcctggttcacctacgagggcgaacagcttggtcaaggtaaggaaaaggtgcgtctttccctcaaggagaaccctgaactcaccgatgagctggaagataagatcttcaagaagctgggagtaggcaagtacgctgcagcctcagatgaactcaccgacgatccagtagagctcgtgcctaacgttgacttcgatgatgaagccgacaccgaagccgacaccgaag

SEQ ID NO: 83 - DNA, 831 bp, Corynebacterium glutamicum
  source: /note="ncgl1886"
atggctaatccattctccaaggcatggaagtacctcatggcgttgttcgactccaagattgaggagaacgcggatcctaaggtacagatccagcaagccatcgaagatgctcagcgccagcatcaggagctctcccagcaggcagcagctgttattggtaaccagcgtcagcttgaaatgcagctgaaccgccgtctggctgaaattgagaagctgcagggcaacacccgccaggctatccagctggctgacaaggctcgcgctgacggtgatgtcaagaaggctactgagtacgaaaacgccgctgaggctttcgctgcacagctggttactgctgagcagtccgttgaagataccaagcagctccacgaccaggctctgcagcaggctgatcaggctaagaaggctgtggagcgtaactccatggctttgcagcagaaggttgctgagcgcaccaagcttctgagccagctggagcaggcgaagatgcaggaaaaggtttccgagtccctgaagtccatggattctttgacctccggcagcactcctaacctggatcaagttcgtgagaagattgagcgtcgttacgctaacgcgcttggccaggccgagcttgcgtccaactctgttgagggccgcatggctgaggttgagcaggctggcgttcagatggctggacactcccgccttgagcagatccgcgctgagatggctggtggttccctgaccgctggtaacaagcaggagtccattgaggctcctgcagcgggcaacaacgtcactgatgacgcagttgcacagcgcatgcgtgagctgcgcggcgaggcttaa

SEQ ID NO: 84 - DNA, 2262 bp, Corynebacterium glutamicum
  source: /note="ncgl1900"
atgagcgatgtaaagtacttcgaagacaccgaatttggcctgatcgaggccgtcgcaaccatcgacaacggtgacttcggaacccgcaccatccgttttgaaaccggccaacttgcccgccaggcagatggtgcagtgaccacctatctcgacgatgacacgatgctgctggcaaccaccaccgcatccaaccagccacgcgagggctttgacttcttcccactgaccgtggacgttgaagagcgtatgtacgcagctggtcgcatccctggctctttcttccgtcgtgagggccgcccatccaccgaagctatcctggcttgccgtctcatcgaccgcccactgcgcccaacctttgttaagggcctgcgcaatgaggttcagatcgttgtcaccgtcatgtccatgaaccctgaggattactacgatgtcgtagcaatcaacggagcttccgcagcaacccgcatctccggacttcctgtctccggcgctgtcggtggcgttcgcatggcactggttgttgatgaaaagcacccagaaggccaatgggttgcattcccaacccacgctcaacatgagcagtccgtatttgaaatcgttgtggctggtcgcctcgtcgagcgcaagcgcggcaacaagaccttctccgacgtcgcagtgatgatggtggaagctggcgcttccgaaaacgttgtcaaccgcgtcaaggacggtgcaccagcaccaaccgaaaagatcgtctccgacggccttgaagcagctaagccattcatcgacatcctgtgccgcgcacaggaaggtctggcacagcgcgttggaaacgcagccaaggaattcccactgttccctccatacaccgacgaggtgtactccgcagtggagcgcaaggtatccaagaagctagcttctttgctgaccctgaaggcaaagcaagagcgcgacgacgctaccaacgcctacatggaagaaatcgaagccgaactgcttccaaagttcgaggcttcctacagctcagcagcggaagcgtccaaggaaatccgtgcagcatacaacgctgtcatgaaggccatcgtgcgccgcatgatcctcaccgatcacttccgcatcgacggccgcggagtcaccgacatccgtgacctggcagtagaagttgagctcatcccacgtgcgcacggttcctccctcttcgagcgtggcgagacccagatcctcggtgtcaccaccctggacatgctcaagatggaacagcaaatcgactccctggcaccaggcgatgcgaagcgctacatgcaccactacaacttccctccatactccaccggtgaaaccggtcgtgtgggctcaccaaagcgccgcgaaatcggccacggtgcacttgcagaacgcgcagttttgccagtaatcccatcccgtgaggaattcccatacgcaatccgtcaggtctctgaagctctgggctccaacggctccacctccatgggctctgtctgtgcatccactctgtccctgtacaacgctggtgttccactgaaggcacctgttgcaggtatcgccatgggacttgtttccggtgaaatcgacggcaagaccgagtacgttgcactgaccgacatcctcggcgcagaagacgcattcggcgacatggacttcaaggttgccggcaccgcagacttcatcaccgcacttcagctggacaccaagctggacggcattccttccaaggtgctctccgatgcgcttgagcaggcacgcgatgcccgactgaccatcctgaacaccatggctgatgtcatcaacggagctgatgagatgagcaagttcgctcctcgcatcaccaccgtgaagatcccagtggcaaagatcggtgagctgatcggaccaaagggtaagaacatcaacgctcttaccgaagagaccggcgcaaacatctccatcgaagatgacggcaccgtgttcatctctgcagctgacggcgcatctgctgaagcggcgatcgaaaagatcaacgctctggcgaacccacagctgccaaaggttggcgagcgcttcctcggaaccgtcgtcaagaccaccgcattcggagcattcgtttccttgctcccaggccgcgacggccttgttcacatctccaagctgggtaacggcaagcgagtagaaaaggtcgacgatgtggtgaaggttggcgagaagattcaggtcgaaatcgctgacatcgacaaccgcggcaagatctccttggtcccagttgttgaagaggactaa

SEQ ID NO: 85 - DNA, 654 bp, Corynebacterium glutamicum
  source: /note="ncgl1905"
atgctggatgagtctttgtttccaaattcggcaaagttttctttcatgaaaactggcgatgctgttaatttagaccatttccatcagttgcatccgttggaaaaggcactggtagcacactcggttgatattagaaaagcagagtttggagatgccaggtggtgtgcacatcaggcactccaagctttgggacgagatagcggtgatcccattttgcgtggggaacgaggaatgccattgtggccttcttcggtgtctggttcattgacccacactgacggattccgagctgctgttgtggcgccacgattgttggtgcgttctatgggattggatgctgaacctgcggagccgctgcccaaggatgttttgggttcaatcgctcgggtgggggagatccctcaacttaagcgcttggaggagcaaggtgtgcactgcgcggatcgcctgctgttttgtgccaaggaagcaacatacaaagcgtggttcccgctgacgcataggtggcttggttttgaacaagctgagatcgacttgcgtgatgatggcacttttgtgtcctatttgctggttcgaccaactccagtgccgtttatttcaggtaaatgggtactgcgtgatggttatgtcatagctgcgactgcagtgacttga

SEQ ID NO: 86 - DNA, 339 bp, Corynebacterium glutamicum
  source: /note="ncgl1911"
atgttccatgacgatgcagtaacagcttcatctggacagttttctagccgcacctcaattcggatccgtacttgcattgccaccagggaacgtaaacctgattctgaactactccgcgtagttcaatccccggagcttccgggagttatccttccagatccgaaacgtcggatgcctggcaggggagcatggttgaccccttccatcgacgcactggaccttgctgaacagcgtcgcgcctttggccgagcgctgagggtgtccacaaccgtggatacaggtcacgtacgcacgtacctggcggaaaacgccggacccgatttttgtaaggaagactga

SEQ ID NO: 87 - DNA, 1397 bp, Corynebacterium glutamicum
  source: /note="ncgl1928"
atgtctgagcagccagcttccattaagcattatgacctcatcatcattggtaccggctctggaaactccattcctggaccagagtttgatgataaatcaattgccatcgtggaaaagggtgctttcggcggaacttgcctcaatgtgggctgcatccctaccaagatgtacgtttacgctgcggatatcgctcaagaaattcaggagtctgctcgcctgggtatcgatgcgacggtcaacagcgtggattggccttccatcgtcagccgcgttttcgacaagcgcatcgacctcatcgcgcaaggcggcgaggcttatcgacgtggccccgaaactccaaacatcgatgtgtatgacatgcacgcatcgtttgttgattccaagacaatctccactggtattgccggccaagaacagctgatcagcggtactgacattgtgatcgcaaccggctcccgcccttacatccctgaagctattgcagagtccggcgcacgctactacaccaacgaagacatcatgcgcctgccacagcagcctgaatctttggtgattgttggtggcggtttcatcgctttggaatttgctcacgtttttgaagcgcttggcaccaaggtcaccatcctcaaccgctctgacgtgctgctgcgcgaggcagatgcagacatctccgcgaaaatcctcgagctttccaaaaagcgtttcgacgtccgcctcagcactgcggtcaccgcagtacacaacaaggccgacggcggcgtgaagatctccatcgacaccggcgacgacatcgaggcagatattttgctcgttgccactggtcgcacccctaacggcaaccaaatgaacttggacgccgcaggcatcgagatgaacggtcgttccatcaaggttgatgaattcggtcgcaccagtgttgaaggcgtgtgggcgcttggcgatgtctcctccccttacaagctcaagcacgtagccaatgcggaaatgcgagcaatcaagcacaaccttgccaaccctaatgacctgcagaagatgccacatgatttcgtgccatcagctgttttcaccaaccctcagatcgcgcaggtcggcatgactgagcaggaggcgcgtgaagctggcctcgacatcactgtgaagatccagaactactctgatgtggcttatggctgggccatggaagataaagatggattcgttaagctcattgccgataaggacaccggtaagttggtcggcgcgcacatcattggtgctcaagcctcaacactgatccagcaactgatcactgtcatggcatttggaatcgatgcacgagaagctgcaaccaagcagtactggattcaccctgctcttccagaagtcatcgaaaatgcacttcttggactggaatttta

SEQ ID NO: 88 - DNA, 732 bp, Corynebacterium glutamicum
  source: /note="ncgl1948"
gtgaccacctcgagtgaacaaccccgtacaggatacaaacgagtgatgttaaagctcggaggtgaaatgtttggtggtggcaaagtcggcgtcgatcctgatgtagtagacaatgttgcacgtcagatcgctgaagttgctaaaactggagcagagattgccgttgttatcggtggcggaaacttcttccgcggagctgagcttcagcagcgtggcatggaccgcgcacggtccgattacatgggtatgctcggcacagtcatgaactgcctcgccttgcaggacttcctcggtcagcatggcgttgaatgccgtgtccagaccgccatcaacatggcacaggtcgcagaaccatatctgccactgcgcgcagaacgccacctggaaaagggccgcgttgtcatcttcggtgctggcatgggtatgccgtacttttccacagacaccactgctgcacagcgtgcgttggaaatcggctgtgacgtcctgctgatggctaaggctgttgacggtgtgtacagcgatgatcctcgtaccaacccagatgctgagctcttcaccgaaattactccaaaggaagtaattgagaagggcctgaaggttgccgatgcaactgcattcagcctctgcatggacaacaagatgcctatcttggtgtttaacctgcttactgaaggcaacattgctcgcgccatcagcggtgaacgtatcggtactctggtcgagtcctga

SEQ ID NO: 89 - DNA, 666 bp, Corynebacterium glutamicum
  source: /note="ncgl1961"
gtgtttgaaaatcgttttgacctgcgttgttatgttgtgactggcgcgggctcggtggatgaggttgtacacactgcgtctgccgcggctcgtggtggcgcgggtgtggtgcaggtgcgttcaaagcctatttcgccagaagcgatgagggagttggcatcaaaggttgcgcttgaggttgcgcggtgcagcccaacaacgagggtgcttatcgacgaccacctccacgttgcttcttccttaatgcgcgaaggactcccgattcacggtgtgcatcttgggcaggatgatgtgtcggtgcttgaggctcatgagttgttggggcctgaggcgatcattgggttgaccactggaaccctagaacttgtggcggcggcgaatgagctgtccgatgtgttggattacatcggtgctgggccgtttcgaaagactcccaccaaggattcaggtcggccaccgattggccttgcgggttatccccctttggtggaattctccaaggtgccgatcgttgcgattggtgatgtcacccctgccgatgtgcgcgctctcagcgcaaccggtgtggctggcgttgccatggtgcgggctttttctgaatctgatgatccacagcaggtcgctgaaaatgtggtggctaactttgaattaggaaggctctcatga

SEQ ID NO: 90 - DNA, 399 bp, Corynebacterium glutamicum
  source: /note="ncgl2001"
atgccgaagattcagtttgatgttttagtccccgacacagattccatcgcactagcgggacgttttaccgtagtcgccaaccttttgatcgaaaaaggcctcatggaccatggcgttgttgtccatgatccagcagcgaaaatcgcagaagctgtggaagagcagcttcgccagacttaccgcgacgagcatgaagatgcagacttggaagaatcctcggtcaaccgttacctcattgaagttgatggagttaaaggctccgttaaccaagtgaccatgatttttgcccgtttgctcaccccgccagcagagttaccaaaggacgctttcctcctggagcaggaacttgcctatgaagttcctgcagtctacccatggactgtggagatccttcgctag

SEQ ID NO: 91 - DNA, 1329 bp, Corynebacterium glutamicum
  source: /note="ncgl2002"
atgactagcccccattctttttctgtcacccccattcgcaccatggctgacggcacgatcaaacagattcaccctttcacaggcaccgaagtgtggacggtccctgggcgtggaaatcgacctctgtcacatcccgcttctacgatcgtcgaactatctgcacacgatcacacctcttactgtgcattttgttccgacaatatgctctccactccgcctgagaaatcgcgcatcatcattgatagctccggcgactttgacatccttcccggagcattgcctggtgagctttcagaaaccactccggaatttcgacgagtccccaatctgtttgagattgtctcttttgactactggcaccagaattttggtttcgatatggattcagaaaccgccatgcgcatggcgcaatacttggcgattccagaaggtcgcgaacatgttttagccattgtgcgcacccgactttctgccgctggtgaagatcccgcgcacatgaccgatggcgagttgttagaaaaagctcccagctactttgctggtggtcatgacgtcatcatcggacgccgacactttgtcgatgacgcaaccaccagtgatcaattggcctcatctggaacactgaccgttaaagagcatgaggcgttcatccgcctgactgtcgatggcatcagggatttgtaccaccgcaaccgttacgcaccctatgtcgtggcgtttcaaaactggttgaaacccgccggcgcgtcttttgaccatcttcataaacagctcgtcgccattgatgaacgcggccgtcttgttgccgatgagctgcatcatctccgcggaaaccccaatatgtacaacgaacttgctgttgattacgccggataccacaacctgctcatcgcggaaaacgatcacgccgtggccttcgcaggtttcggtcaccgctaccccaccattgagatttactctaagtccgctattcctgaaccctggcttcaaagcgacgaggaaatccaagcgatgagcaacctcatccatgcatgccatgctgcaaccggcgcagatgtaccctgcaatgaggaatgggtacacaaaccaatcgatgttgatatgccaatgccctggcatgtaatgatcaaatggcgtgtttctaccctggcaggttttgaaggtggcaccaaggtgtatctcaatacgctgtctccacacaacgtccgagaccgtgtggtgaaagaaatgtaccgactacgcgatgaagaactcatcgcatctgatctgcgcatcgccatggaatgctccgttgaacgcaacagccttaaatacaatcccctcctataa

SEQ ID NO: 92 - DNA, 609 bp, Corynebacterium glutamicum
  source: /note="ncgl2019"
atgactgtcgcaccaagaattggtaccgcaacccgcaccaccagcgaatccgacatcaccgtcgagatcaacctggacggcaccggcaaagtagatatcgataccggcctgccatttttcgaccacatgctcactgcattcggcgtgcacggcagttttgatctgaaagtccatgccaagggcgacatcgagatcgacgcacaccacaccgtggaagataccgccatcgtgctcggccaagcactccttgacgctattggcgacaagaaaggcatccgccgtttcgcatcctgccagctgcccatggatgaggcattagtggagtccgtggtggatatctccggtcgcccatacttcgtgatctccggcgaaccagaccacatgatcacctccgtgatcggtggacactacgcaaccgtgatcaacgagcacttctttgaaaccctcgcgctcaactcccgaatcaccctccacgtgatctgccactacggccgcgaccctcaccacatcaccgaagcagagtacaaggctgttgcccgtgcgctgcgcggtgccgtagagatggatcctcgtcaaacaggaatcccatccaccaagggagcgctctag

SEQ ID NO: 93 - DNA, 1206 bp, Corynebacterium glutamicum
  source: /note="ncgl2048"
atgagccagaaccgcatcaggaccactcacgttggttccttgccccgtaccccagagctacttgatgcaaacatcaagcgctctaacggtgagattggggaggaggaattcttccagatcctgcagtcttctgtagatgacgtgatcaagcgccaggttgacctgggtatcgacatcctcaacgagggcgaatacggccacgtcacctccggtgcagttgacttcggtgcatggtggaactactccttcacccgcctgggcggactgaccatgaccgataccgaccgttgggcaagccaggaagcagtgcgttccacccctggcaacatcaagctgaccagcttctctgatcgtcgcgaccgcgcattgttcagcgaagcatacgaggatccagtatctggcatcttcaccggccgcgcttctgtgggcaacccagagttcaccggacctattacctacattggccaggaagaaactcagacggatgttgatctgctgaagaagggcatgaacgcagcgggagctaccgacggcttcgttgcagcactatccccaggatctgcagctcgattgaccaacaagttctacgacactgatgaagaagtcgtcgcagcatgtgccgatgcgctttcccaggaatacaagatcatcaccgatgcaggtctgaccgttcagctcgacgcaccggacttggcagaagcatgggatcagatcaacccagagccaagcgtgaaggattacttagactggatcggtacacgcatcgatgccatcaacagtgcagtgaagggccttccaaaggaacagacccgcctgcacatctgctggggctcttggcacggaccacacgtcactgacatcccattcggtgacatcattggtgagatcctgcgcgcagaggtcggtggcttctccttcgaaggcgcatctcctcgtcacgcacacgagtggcgtgtatgggaagaaaacaagcttcctgaaggctctgttatctaccctggtgttgtgtctcactccatcaacgctgtggagcacccacgcctggttgctgatcgtatcgttcagttcgccaagcttgttggccctgagaacgtcattgcgtccactgactgtggtctgggcggacgtctgcattcccagatcgcatgggcaaagctggagtccctagtagagggcgctcgcattgcatcaaaggaactgttctaa

SEQ ID NO: 94 - DNA, 1461 bp, Corynebacterium glutamicum
  source: /note="ncgl2077"
gtgaccactccacacttggattctgcacaagatattgatctgtcccgcgtccacctcatcggtattggcggagccggaatgtctggcgttgcccgaatcctgcttgcccgcggtaagacagtcactggttccgatgccaaagattcccgcaccttgcttccactccgcgccgtgggagccaccatcgcagtgggacacgctgcggaaaaccttgagctttccggcgaacttcccaccgtcgtggtgacctcttttgccgccattccgcaagacaacccggaacttgttcgtgcacgtgaagaaggcattccggttattcgtcgctccgatctgttgggcgaattgctggaaggctccacccaggtcttgatcgcgggtacccacggtaagacctccaccacctctatgtctgtggtagctatgcaggcagcgggcatggatccaagctttgctatcggcggacagctcaacaaggctggcaccaatgcgcaccatggaactggtgaggtctttatcgctgaagcagatgaatctgacgcatcgctgctgcgctacaagccaaatgttgcagtggtcaccaatgtggaaccagaccacctggacttctttaaaacccctgaagcctacttccaagtgttcgacgatttcgcaggacgcatcaccccgaacggcaagctggttgtgtgcctgaacgatcctcacgcagcggagctgggggagaggtctgtccgcaagggtatcaagactgttggttacggtaccgctgacgcagtacaggcacaccctgaggttccagcgatggctaccgtcgtggattcccaagttgtcgcagaaggcacccgcgccaccatcaacatcgatggacaggaagtatctgtgattcttcaaatccctggtgatcacatggtactcaacggtgcagccgccctgctggccggatacctggtgggtggggacgtcgataagcttgttgaaggcttgtcggatttctccggcgtgcgacgccgctttgagttccacggtgctatcgagggcggcaaatttaatggcgctgctatttatgatgattacgcacaccacccaacggaagtaactgcagtgctcagcgctgcgcgcacccgggtgaaggccgctggaaagggccgtgtcatcgtcgcgttccaaccacatttgtactcacgcaccatggaattccaaaaggagttcgcggaggcactgtcactggcagacgctgccgtggtgctcgagatttacggagcgcgcgaacaaccggtggatggcgtgtcctcggaaatcatcaccgatgcgatgaccattccagtggtgtacgaacctaatttctctgcagtcccagaacgcattgcagaaatcgcaggacctaatgacatcgtgctcaccatgggtgcaggttccgtgaccatgcttgctccagaaatcctggatcagctgcaaaacaattag

SEQ ID NO: 95 - DNA, 738 bp, Corynebacterium glutamicum
  source: /note="ncgl2104"
atgaaaaacaactggtatcggcttttcaagtatgtgctgattggcccgtttttgcgtgtgtacaaccgcccggagatcgaaggcaaagaaaacatccctgcagaaggtgccgcgatcatggcgtccaaccacgaagcagtgatggattccttttatttccccctgctgtgcccacggcagctgaccttcccagcgaaggccgaatacttcacatcaccaggtattaaaggcaagatgcagaagtggttttttacttctgtggggcaagtacccctggaccgcaccgcagataatgccatggattctttgatgaataccgccaaaatggtgctggatcagggagacctcttcggtatttaccctgaaggatctcgttcgcccgatgggcgcatctacaagggcaaaaccggaatggcctatgttgcgatggaaacgggtaagccagttatccccattgccatgattggcagccgggacgcgaaccctatcggaagttggtttccgaaacccgcaaaagtcaggatcaaggtaggaagcccaattgatcccctcgcattcgtcaaagaacatgggttgaagcctggaacctacgaagcagcgcgcaagctgacagatcacgttatgttcattcttgctgatctcactggtcagccgtatgttgatgcgtactctaaagatgtgaaaaacgctctggaggaaggaaaaggatacccggagggcacagctccttcacagtaa

SEQ ID NO: 96 - DNA, 3138 bp, Corynebacterium glutamicum
  source: /note="ncgl2147"
atgtcaggaccgttaagaagtgaacgtaaagtcgttggctttgtcagagacccactgccaaaagttggttctttatcgctgaaatctgagcatgcccaagcagatctagagcatttgggttggcgcaatgttgagtctttggatttgttgtggggcttgtcaggtgcaggcgatcccgatgtcgcgctgaaccttcttattcggctgtatcaggcacttgaagcaatcggcgaggatgctcgaaacgagcttgatcaagagattcgccaggatgaagaactacgagtccgcctttttgcattgttgggtggttcctcggctgtcggtgatcacttggtcgccaatcctttgcagtggaaactcttaaaacttgatgcgccatcgagggaagagatgtttcaggcgctgctggaatctgtgaaagctcagcctgctgtgcttgaggttgaggatttcagcgatgcacacaacattgcccgagacgatttgagcacgcctggtttttacacggctagtgttaccgggcctgaagcagagcgagtcttgaaatggacttatcgcacgttgctgacccggattgctgcgcatgatttagcgggtacctatcccaccgacatgcgaagaaaaggtggcgatcctgttccgtttagcacagtgaccatgcagctcagcgacctagctgatgctgctttgactgctgctttagctgtggcaattgccaatgtttatggtgaaaagccggttgattcagctttatctgtcatcgcgatgggcaaatgtggcgcgcaggaattgaactacatttcagatgtggacgtggtgtttgttgcagagccggcaaactctaaatcaacacgcaccgcagcagagctcattcgcatcggtagcaactcgttctttgaggtggatgcagcacttcgcccagaaggtaaaagtggcgctcttgtgcgctctttggattcccatatggcgtattacaagcgctgggcggaaacctgggagtttcaggcactgctgaaagctcgtcccatgacgggtgatattgaccttgggcagtcctatgtggatgctctttcaccgttgatttgggcggctagccagcgggaatcatttgtcacagatgtccaagctatgcgccgtcgagtgttggacaatgttccggaagacttgcgtgatcgtgagctgaagcttggtcgcggtggtttgagggatgtggagtttgctgtccagctccttcagatggtgcatggtcgcattgatgagacgttgcgggttcggtcaacggtaaatgctttgcatgtgttggttgatcagggatatgtgggtcgtgaagacgggcataatctcattgagtcgtatgagtttttgcgcctgttggagcatcgccttcaattggagcggatcaagcgcactcacttgttaccgaaacctgatgaccgaatgaatatgcgctggttggcgcgcgcttctgggtttactggttcgatggagcaaagttcggccaaagctatggaacggcatttgcgtaaggttcgtttgcagattcagtcgttgcatagtcagctgttttatcggccactgctgaactctgtggtcaacttgagcgcggatgccatcagattgtctccggatgctgcaaagctacaattgggggcattgggatacctgcatccatcacgtgcttatgaacacctgactgctcttgcatcaggagctagccgtaaagccaagattcaggcgatgttgctgcccacgttgatggagtggctgtctcaaacagctgaaccagatgcgggattgctgaattaccgcaagctttctgatgcttcctatgatcgcagctggtttttgcgcatgctgcgtgatgagggcgtagtggggcagcggttgatgcgtattttgggaaattctccctatatttctgaactgattatctccactccggactttgtgaaacagctgggtgatgcggcgtctggtcctaaattgcttgctactgcaccgactcaggttgtgaaagcaatcaaggcgacggtgtcgcgtcatgagtcacctgatcgggcgatccaggctgcacgatcgctgaggaggcaggagctggcacgcattgcctctgctgatttgctcaacatgctcactgttcaggaagtatgccaaagcttgtcactagtctgggatgcggtgttggatgctgccttggatgcggaaatccgtgctgcacttaacgatccacagaaaccagatcagcctctggccaatatttctgtgatcggcatgggccgtttgggtggagcagaacttggatacggttctgatgccgatgtgatgtttgtatgcgagccggtagccggtgtggaagagcatgaggccgtcacatggtctattgcgatctgtgattccatgcggtcgaggcttgcgcagccttccggtgatccacctttggaggtggatctggggctgcgtcctgaagggagatctggtgcgattgtgcgcaccgttgattcctatgtgaagtactacgaaaagtggggtgaaacttgggagattcaggcgctgctgagggctgcgtgggttgctggtgatcgtgagctgggcattaagttcttggagtcgattgatcgtttccgctacccagttgacggggcaacgcaggcgcagcttcgtgaagttcgtcgaattaaggcgagggtggataatgagaggcttccgcgcggggctgatcgaaatacccataccaagctgggtcggggagcgttaactgacatcgagtggactgtgcagttgttgaccatgatgcatgctcatgagattccggagctgcacaatacgtcgacgttggaagttcttgaagtgctggaaaagcatcagattattaaccctgtgcaggtgcagacgcttcgggaagcgtggctgacggcaacggctgctaggaatgcgcttgtgctggtcaggggtaagagattagatcagttacctactcctggtccgcaccttgcgcaggtggctggtgcgtctggttgggatccaaatgagtaccaggagtatttggaaaactatctgaaagtgaccaggaagagtcgtcaggttgttgatgaagtcttctggggtgtggactctatggagcaacgtgagttttag

SEQ ID NO: 97 - DNA, 1428 bp, Corynebacterium glutamicum
  source: /note="ncgl2153"
gtggaacaatgggagcgcatgaagctctatgcagcagtcctcgactttgaaccagtggcacaagagttcggtgtggagcgaggttttgaccctcatatccacgacgaagccgcgtcaagtgtcgataggtatgcgcaagagcgggaagatctcctgcacatgccctttgtcaccatcgatcccgtaggttccagagacctcgatcaagctgtgctgattgaggagatcgacagcggatttcgggtgcattacgcgattgcagatgtcgcagccttcgtggagccgggcagtgaattggaaaagatttcccttcaccgcgggcagactatttatctgccggattccccagcgcgactgcaccctgaggaattatccgaagatgcggcaagcctgctggagggacaaacgagaccagcggttgtgtggtcgattgatctagatgaacgtggcgaagtcacagccaccaaggtgcgtcgcgggttggtgaaatcccgggcgcgtttggattatgatcaggctcaaatagatgccgagaatggtcggttgcatccgtcgataagcttattgcccaaggtcgggcagctgaggcaggaaagcgcgctacggcgcgaagccgtgaatctttctattcccagccagcgagtggtgaaagtgcccaatgatgacgccggtgagcactatgaaattgtcatcgagccacgcccgcacatcatggattacaattccgagatttccctgctcacaggcatggtagcaggggagatgatggtgaaagcggggcacggtttgctgcgtacactcgccccggcgaccaaagaatccgaagctactttcagatcagaggcgcaagcccttggttttgagatcgcgcccgaacaacccatcggtgagtttcttcaaagtgtggatcccaatacgcccaaagggatggccattcagagggaagcgcagaaactcttgcggggttctggctacgccagcgtgaaaaatggggactcggaagtgcattccggtgttggtggttactatgctcacgtcaccgcaccgctgcgccgacttatcgaccgtttcgccaccgaacattgtcttgcgattgcctccggaacggacgttcctgaatgggtgaccagggtggaagagcaagttctcgacaccatgaaatactcctccattttggccagccaagtggataatgcctgcctcgacctcacagaagccaccgtgttgaaatactgggagggccaaaacttcaacgcggtggttgtagcgagcgaacctgaaaagaactctgctcgactttttgtgtacaaaccgccagtgttggcaaagtgtattggcgccccagaacagggaactaaccaagaagtcacactggtgactgcgaacttgaagaagcgtgaagttttgtttgcgtggccggctgactaa

SEQ ID NO: 98 - DNA, 246 bp, Corynebacterium glutamicum
  source: /note="ncgl2190"
atgaatatcgtcttgcagggatcgtttagcactcgacaggagttctttgatctcctcggtgccgctgcctggggtgtggaacgaccagcgccaaccaatctggacggcatggtcgatctgatccgggaaactggactggacacaatcaccgtcaaaggtcactggcttgtaccggcagaggaaacagaacggattgaagaagtctgcgatgatctaggcgttgatctgagcttcaaccgtcgctaa

SEQ ID NO: 99 - DNA, 729 bp, Corynebacterium glutamicum
  source: /note="ncgl2204"
atgcgtagggacagttttcgggaccgcgcgctagtagtcaaaacttatgattttggcgaagccgaccgcattattgtgctgctcacccgagaccacggcatcgtgcgcggagttgccaaaggagtacgccgatccaaatcccggtttgggtcaaggctgcagctttttgtggaactcgacgtgcagctctacccaggtagaaaactgtccaccatctctggcgcggacaccgtcggctactacgcatcaggcatcatcgaggacttcactcggtattcctgtgcgtccgccatactggaaatcgccacccacatcgcaggactggaagacgatccgcacctgtttgaagaaaccacccgggcgttgaaaaacattcaggactccccagaacccatcctcaacctagacgagttcatgctccgcgccatgaaccacgccggctgggcaccaagccttttcgactgcgcagcctgcggccgaccaggacctcacaacgcattccacccaggcgtcggcggggcagtgtgcctgtactgccgaccgccgggaagcgccgaagttccaccagaagcactacacatgatgtggttggtcgccaacggccaagcagcccgcattccccgggaacacccagagcagcaaaccaccattcaccaactgacaaccgcgcatctgcagtggcatattgaaagaaagctgcccacgctggcggtgctggatcaggcctag

SEQ ID NO: 100 - DNA, 1149 bp, Corynebacterium glutamicum
  source: /note="ncgl2210"
gtggcacgtgactattacggcattctcggcgtcgatcgcaatgcaaccgaatcagagatcaaaaaggcataccgaaagcttgcccgcaaataccacccggacgtaaacccaggtgaggaagcagcggagaaattccgcgaggcttctgttgcgcatgaggtactcactgatccggataagcgccgcattgttgatatgggcggtgacccaatggagcaaggcggcggagctggcgctggtggcttcgatggaggcttcggcggcagcggtggcctgggcgatatcttcgatgccttcttcggcggtggcgcgggcggttcccgtggaccacgttcccgcgtgcagccaggcagtgacaccttgtggcgcacctccatcaccttggaagaggcttacaagggcgctaagaaagatctcacccttgacaccgcagtgctgtgtaccaagtgtcatggttctggatctgcatccgacaagaagcctgttacctgtggcacctgtaatggcgctggtgaaattcaggaagtgcagcgcagcttcctgggcaacgtcatgacgtcccgcccatgccacacctgcgatggcaccggtgagatcatcccagatccttgcactgagtgtgtaggagatggtcgtgtgcgtgctcgccgcgacatcgtggccaacatcccagctggcatccagtccggcatgcgcatccgcatggcaggccaaggtgaggttggcgctggtggcggtcctgcgggtgacctctacattgaagtcatggtgcgcccgcacgccatcttcacccgcgatggcgacgatctgcacgccagcatcaaggttccaatgttcgatgcagcgcttggcaccgaattggacgtggaatccctcaccggcgaagaggtgaaaattaccatccccgcaggtactcagcccaatgatgtgatcaccttggatggtgaaggcatgccgaagctgcgtgcagaaggccacggcaacctcatggcgcatgtcgatctatttgtgccaactgatttggatgaccgcacccgcgaactgcttgaagaaatccgcaaccatcgcagcgacaacgcttccgtgcatcgcgaaagcggagaagaatccggtttctttgacaagctccgaaacaagttccgcaaataa

SEQ ID NO: 101 - DNA, 1026 bp, Corynebacterium glutamicum
  source: /note="ncgl2211"
gtgagtgcaacagagaaacgtagatacgaagtgttgcgggccatcgtcgctgattacattgcgtctcaggaacctgtcggatcgaagtcactcctcgagcgccataagctcaacgtgagttctgcgacgatccgcaacgatatgtcggtgctggaatccgatggctttatcgtccaagagcatgcaagttctggccgggtaccaaccgaaaagggttaccgcctttttgttgattccatccatgacatcaagccgctgtcgctggcggaacggcgcgctattttgggcttccttgaagggggagtggacttagaggacgtgctgcgcaggtctgtgcagctgttgtctcagctcacccatcaggctgccgtggtgcagctgcccaccttgaaaacagcgcgcgtgaagcactgcgaggtggtgccgctgtcgccgatgcgcttgctgctggtgctcattaccgatactggccgtgtagatcagcgcaacgtggaacttgaggaaccgctggcggcggaagaagttaatgtgctgcgcgatctgctcaacggcgcgctaggggagaaaacgctgacggctgcatcagatgcgctggaggagttggctcagcaagccccaaccgatattcgtgatgccatgcgccgctgctgcgatgtactggtgaacacgcttgtcgatcaaccctctgaccgcctgatcctcgccggcacctcaaacctcacccgcttaagcagggaaacctccgcgagcctaccgatggttttagaagccttggaagagcaggtggtcatgttgaaactgctgtccaatgtcactgatcttgaccaagtgagcgtgcatattggcggcgaaaatgaagacattgagctgcgcagcgcaacggtgattaccaccggttacggctcccagggcagcgcactgggcggattgggggtggttggccccacctatatggactactcgggaacaatttctaaggtgtccgccgttgctaagtatgttggtcgtgtgctcgctggcgaatag

SEQ ID NO: 102 - DNA, 2220 bp, Corynebacterium glutamicum
  source: /note="ncgl2247"
atgactgaacaggaactgttgtctgctcagactgccgacaacgctggaactgacagcaccgaacgcgttgacgcgggcggaatgcaggttgcaaaagttctctacgactttgtaaccgaagcggtactccctcgcgtgggtgtggatgcggaaaagttctggtccggattcgccgccatcgcaagggacctcaccccacgcaaccgcgaactgcttgctcgtcgcgatgaactgcagacgcttatcgacgactaccaccgcaacaactccggcaccatcgaccaagacgcgtacgaggatttccttaaagaaatcggatacttggttgaggagccagaagctgcagaaatccgtacccaaaacgtcgatacggaaatctccagcaccgcaggacctcagctggttgtgccaattctgaacgcacgcttcgcgctgaatgctgccaatgctcgttggggttccctctacgatgcgttgtacggcaccaacgccatcccagaaactgatggcgctgaaaagggcaaggagtacaacccagttcgtggccagaaggtcatcgagtggggtcgtgaattcctcgacagcgttgtcccactggaaggtgcttcgcatgccgatgttgagaagtacaacatcacggatggaaagcttgcagcccatgttggcgacagcgtctaccgtttgaagaatcgcgattcttaccgcggcttcaccggcaacttccttgatccagaagtaatcctgctggaaaccaatggcctgcacattgagcttcagatcgatcctgtccacccaatcggcaaggcagacaagaccggtctgaaagacatcgttttggaatctgcgatcaccacgatcatggacttcgaagactccgttgcagctgttgatgctgaagacaagaccttgggttactccaactggttcggactcaacaccggcgaactgaaagaagagatgtccaagaacggacgcaccttcacccgtgagctcaacaaggaccgcgtctacattggccgcaatggtaccgagctggttctgcatggtcgttccctgctgttcgtccgcaacgttggtcacctcatgcaaaacccatccatcttgattgatgacgaggagatcttcgaaggcatcatggatgctgtcttgaccactgtttgtgccatcccaggaattgctccgcagaacaagatgcgcaattcccgcaagggctccatctacatcgtgaagcctaagcagcacggccctgaagaagtcgcgttcaccaacgagctcttcggccgcgttgaggatctgcttgatctgccacgccacaccttgaaggtcggtgttatggatgaggagcgtcgcacgtccgtgaacctggatgccagcatcatggaagttgctgaccgcttggcattcatcaacactggcttcctggaccgcaccggcgatgaaatccacacctccatggaagcaggcgccatggtgcgcaaggctgatatgcagaccgcaccgtggaagcaggcctacgagaacaacaacgttgatgcaggtattcagcgtggtcttccaggcaaggctcagatcggtaagggcatgtgggcgatgactgaactcatggcagaaatgctggagaagaagatcggccagccacgcgaaggcgccaacactgcatgggttccttcaccaactggtgcgacgctgcacgcaacgcactaccacttggttgatgtgttcaaggttcaagacgaactgcgtgctgccggccgccgcgacagcctgcgcaacattctcaccattccaaccgcaccaaacaccaattggtctgaggaagagaagaaggaagagatggacaacaactgccagtccatcctcggatacgttgtgcgctgggttgagcacggtgttggttgctccaaggttccagacatccatgacatcgacctcatggaagaccgcgcaacgctgcgtatttcctcgcagatgctggccaactggatccgccatgatgttgtctcgaaggagcaggtcttggagtcactggaacgaatggcagtggtcgtcgacaagcaaaatgcgggcgacgaggcctaccgcgatatggcgccgaactacgacgcctccctcgccttccaggcggctaaggacttgattttcgaaggcaccaagtccccatcgggctacaccgagcccatcttgcacgcacgccgccgcgagttcaaagcaaaaaactaa

SEQ ID NO: 103 - DNA, 663 bp, Corynebacterium glutamicum
  source: /note="ncgl2250"
ttgtattataagcaattggactccctagtattcacggatggggagtcaatcgcaaaagctagactggcgtctatgactgacatgtggtttagctctgaccttcatttaggtcacaaattcgtggcatcgatgcggggtttcgacgatccagatgaacacgatgaagtaatactgagcaattttgagaacacgatcggcccagatgatgcgctgtggcttttgggagatctttcctctggtgcccatcgcgctgaagagcgcgcgctgggcttaattgctgagcggctgggcggcgtcgtcaagcatcttgttccaggaaaccacgattcttgccacccgatgtaccggcatgcgtacaagcggcagcggcggtttttggaggtttttgattcggttcaggcgtttcagcggatgaaatgggacgacgaggatgtctacttgtcgcatttccctcggccgggccaagatcatccggggatggaatcgcggtttgatgatctccgcctgcgtgtgcctttgctgattcatgggcatttgcattcccagttccccatgacggggccggggcaggttgatgttggggtagaggcgtggggtttgaagccggcacctcgtgaattagtgcagctcaagctgtgggaatcgctgagcgagaagatttaa

SEQ ID NO: 104 - DNA, 1110 bp, Corynebacterium glutamicum
  source: /note="ncgl2274"
atgcgtgaacgcatctccaacgctaagcgagtggtggtgaaaattggttcgtcctcattgactaacgatgaggacggacacaccgtcgatcccaaccgcatcaacactattgtcaatgccttgcaagcacgcatggaagctggctcggacctcatcgttgtgtcctctggcgcagtggccgcgggaatggccccgcttggattgagcacccggcccacggaattggcagtcaagcaggctgcagcagcagtggggcaagttcacctcatgcaccagtggggacgttcttttgcccggtatggtcgccccatcggccaggtgcttcttaccgcagctgatgcaggaaagcgtgatcgtgcgaggaatgcgcagcgtaccatcgacaagctgcgcattttgggcgcggttcctatcgtcaatgaaaatgacaccgtggcaaccaccggtgtgaattttggtgacaacgaccgacttgctgcaattgtggcgcacctggtgtcggctgacgctttggtgctgctcagtgacgtggatggactttttgataagaaccctactgatcccaccgcgaagtttatttccgaggttcgtgacggcaatgatttgaaaggtgtcattgccggcgacggcggaaaagtgggcaccggcggcatggcatcaaaggtgtctgctgcacgtttggcttcccgaagtggcgtgcctgtgctgttgacctctgcggcaaacattggcccagcactggaagacgcccaggtgggcactgtattccaccccaaggacaaccgcctctccgcgtggaagttctgggctttgtatgccgcagatactgcaggaaagatccgacttgatgatggcgcggtggaagcagtgacctccggtggtaaatctttgctggctgtgggcattactgagatcattggtgatttccaacagggtgagatcgtggagatcttgggacctgccggccaaatcatcgggcgaggcgaggtgtcctacgattctgataccttgcaatcaatggttggcatgcaaacgcaggaccttccagatggcatgcagcgcccggtagtgcatgcagattatctgtccaactacgccagccgcgcgtaa

SEQ ID NO: 105 - DNA, 453 bp, Corynebacterium glutamicum
  source: /note="ncgl2286"
atgcgctccgctcacggcccatacattgataagttcttccccgagccatacaagaacatgctcgagctcaccaagactctgcgaaagatctacccggacgttgatctgcctacctcattgattgagctggtcaatgtccgcgtttctcaaatcaacggatgtggcacctgcttaagtttacatgttcccgctgctcgccgtgccggcgttccagagaagaaactcgatgctctggcagcgtggcaaatggtggatgaattcaccgtggaggaaaaggcagcactacagctagcagaatccttaaccttgctggaatcccacgaaggtcacctggctgcacgcacagcctgcagtgtgtttgccgaagagcaggtagctgccctggaatgggcaatcattgcgatcaatgctttcaaccgcatttctattgccagtgggcacccactgctctag

SEQ ID NO: 106 - DNA, 411 bp, Corynebacterium glutamicum
  source: /note="ncgl2287"
atgactgaacgtactctcatccttatcaagccagacggtgttaccaacggacacgtcggcgaaatcatcgcacgtattgagcgcaagggcctgaagctcgctgctctggatctgcgtgttgcagaccgcgagaccgctgaaaagcactacgaagagcacgctgacaagccattcttcggtgagctcgttgaattcatcacctctgcacctctgatcgcaggcatcgtcgaaggcgagcgtgcaatcgatgcatggcgtcagcttgctggtggcaccgacccagttgctaaggcaaccccaggcaccatccgcggcgatttcgcactgactgttggagagaacgttgttcacggttctgattccccagagtccgctgagcgcgagatctccatctggttccctaacctgtaa

SEQ ID NO: 107 - DNA, 780 bp, Corynebacterium glutamicum
  source: /note="ncgl2298"
atggcgacatcacatcgagatcccgaaaacatagaccaggccggtagcgaattcactgaatctgattcaggacacactgcaacccctgaagaggtagtagccaccgctctgactttttttgcagagaatggttttagcgaaaccaaattggagaaaatcgcgaaggcatctggcatgtccaagcgcatgatccactatcactttggcgataagaaaggcctgtacatcaaggctgtttcctacgcattgcgattgctgcgcccagaggctgaagcgatgcaacttgattccgcggtaccagttgatggtgtccgcaaaatcgtcgaggctttatatacctgcatcaccaagcacccagaagcagtgcgcctgctattgatggaaaacctgcatagccaagacagcgtggattccaccgcggcatattccgatgaatccaatgtgctgctcaacctggataagctgctcatgcttggccaggatgccggcgccttccgtcctggaatctccgcagaagacgtactggttcttattaactccctggcttacttccgcgtatccaacaaggtcacgttgaagaacctctactcccttgatttggaatcagaggccaatattgaaggtatgaagcgcatcgccgttgacacggtgctggcattcttgacctcaaatattcaaaattctggcaactccagctacctggttgttggtggcaagactgcagaaccagaaactgatgacagcgtctacagctttgatacggacgtgttcgaaaactaa

SEQ ID NO: 108 - DNA, 627 bp, Corynebacterium glutamicum
  source: /note="ncgl2327"
atgagcaacggattccaaatgccaacgtcccgttacgtgctgccttccttcattgagcagtccgcatacggcaccaaagagaccaacccttacgcaaaactctttgaagagcgcatcatcttcctgggcacccaggtcgacgacacctctgcaaacgacatcatggcgcagctccttgtcctcgaaggcatggacccagaccgcgatatcaccttgtacatcaactcacctggtggatccttcaccgcgttgatggcaatttacgacaccatgcagtacgtccgcccagacgtgcagaccgtctgcctcggtcaggcagcatccgcagccgcagttcttcttgcagcaggtgcaccaggtaagcgcgctgttcttcctaactcccgcgtgctgatccaccagccagcaacccagggtacccagggtcaggtttccgaccttgagatccaggcagctgaaatcgagcgcatgcgtcgtttgatggaaaccaccctggctgagcacaccggcaagaccgcggagcagatccgcatcgataccgaccgtgacaagatcctcaccgctgaggaagcactcgagtacggcatcgttgaccaggtcttcgattaccgcaagctcaagcgctag

SEQ ID NO: 109 - DNA, 504 bp, Corynebacterium glutamicum
  source: /note="ncgl2399"
atgtcagcagccgaaggcttacatattgtcgtcatgggagtttccggctgcggcaaatcctccgtcggcgaagccctagcagcggagctcggaatcgaatacaaagacggcgacgaacttcacccccaggaaaacatcgacaagatggcctccggccaggcacttgacgacgacgaccgtgcatggtggctagtccaggttggcaagtggctccgcgaccgaccaagcgacgtcatcgcatgctccgccctcaaacgctcctaccgcgatctcctgcgcaccaaatgcccaggaaccgtcttcgtccacctccacggcgactacgatctcctactttcccgcatgaaggcccgcgaagatcacttcatgccatccaccttgctagattcccaatttgcaaccctcgagccactcgaagatggcgaagatggcaaggttttcgacgttgcccacaccatcagcgaactggccgcccaatctgcagaatgggttcgcaacaaataa

SEQ ID NO: 110 - DNA, 495 bp, Corynebacterium glutamicum
  source: /note="ncgl2425"
atgacaagtgagaattccgaatcccaggacatttggctaaccgatgagcaacaagatgtgtggctcgatgtgtggacaatgcgaatcggcctgcctgctcgcttggatgctcaactgaaagaagctgcgggtgtcagccactttgagtacttcaccatggcgcagatttctatggccccggaacatcgggtgcgcatgagtgagcttgctgagctgtccgatatgacgctatcgcatctatctagagtggttactcgcctagaaaaggctggctgggtgaagcgtgttcccgatcccgatgatggtcgcgccaccgttgctgtgctcacggactctgggtgggagaaagttaaagcaacagcccctggtcatgtgaaggaagtgcgtcgtttggtgtttgacgatctcactccagaagaactcaaggtaatgggcactgcaatgaagaagattgtgaaccgactcgatatgtccaacaggctgccgcgggtgtag

SEQ ID NO: 111 - DNA, 753 bp, Corynebacterium glutamicum
  source: /note="ncgl2440"
atgcccccagcaaacgaaagtcctatgactaatccattaggttctgcccccaccccagccaagccacttcttgacagtgttcttgatgagctcggtcaagatatcatcagtggcaaggttgctgtcggagataccttcaagctgatggacatcggcgagcgttttggtatttcccgcacagtggcacgcgaagcaatgcgcgctttggagcagctcggtcttgtcgcttcttcacgtcgcattggcattactgttttgccacaggaagagtgggctgtttttgataagtccatcattcgctggcgtctcaatgacgaaggtcagcgtgaaggccagcttcagtctcttaccgagcttcgtattgctattgaaccgattgccgcgcgcagcgttgctcttcacgcgtcaaccgccgagctcgagaaaatccgcgcgctggcaacagagatgcgtcagttgggtgaatctggtcagggtgcgtcccagcgcttcctcgaagcggacgtcaccttccacgagctcatcttgcgttattgccacaatgagatgttcgctgcactgattccgtcgattagcgcggttcttgtcggccgcaccgagctcggcctgcagcctgatctgccggcgcacgaggcgctagacaaccacgataagcttgccgacgccctccttaaccgcgacgccgacgccgcagaaactgcgtcccgaaacatcctcaatgaggtgcgcagcgcgctgggcacgctgaactaa

SEQ ID NO: 112 - DNA, 636 bp, Corynebacterium glutamicum
  source: /note="ncgl2441"
gtggaggactatctcacagaacttttccgtgcagaagaatgggatgaggaaccaacaacaggaaaactcgctgaagtaattggagttaccgcatcaacggtgtcggcgacgctcaaaaaactcaaccttgagggcttcgtcaattaccgtccctacggggacatcgagctgacgcccgcaggtcgagacatcgccatcaacgtgatcaggcggcgccggatcattgagacctatctgtctgagaagcttggattaggcgctcatgaactacacggcgaggcggatttattcgagcacgcggtgtctccacgagtgttggagaaaatgttccaggcagtgggctatccgacgctggatcctcacggggatcccatccccaccgaatctggggagatgagcatcaatgatgggctcatgcttttggaactaaaagctggcgcatctgccacggttacacgtgttagggacggaaacccatcagtggttcggtacctcactggagtgggaattaccgtgggcacaacggtcacggtcgttgaagctcttagcgatatcgccacactgcgcctgcagatcggggaaatatttcaagacattccccttgcggtggcaaacgcagtgcgcgtatcacgttag

SEQ ID NO: 113 - DNA, 834 bp, Corynebacterium glutamicum
  source: /note="ncgl2446"
atgacaaacactcaaaccgagatcattaatgaactaaaggtgagcccagcaatcgacgtggccaaggaagttgaattccgtgtgcagttcctcgtcgattacctgcgggcttcccatacaaaaggctttgttcttggtatttcaggtggccaggattccactcttgcgggacgcctcgcgcagctggcagtagagcgcattcgtgcggaagaaaacagcactgattatgtcttctacgcagttcgcctcccctacgcgattcaggcagatgaagacgatgcgcaggttgcattggaattcatcgcacctgacaagagcgtgaccgtcaacgttaaaggcgcaacggacgccaccgaagcaactgttgcagctgctttggaaatttctgagctgaccgattttaatcggggcaatattaaagctcgccaacgcatggttgcccagtacgcaatcgcaggccagttgggcttgctggttattggcactgatcacgcggctgaaaacgtcacggggttcttcaccaaattcggtgatggcgcagccgacctgcttcctttggcaggtttgagcaagcgtcaaggagctgccattctggagcacctgggtgcaccttcaagcacgtggaccaaggttcctaccgctgatttggaagaggatcgcccagcgttgccagatgaggaagcacttggtgtgtcgtatgcggacatcgataattacctggaaaacaagcccgatgtcagtgaaaaagcccagcagcgcattgagcacctgtggaaggtgggccagcacaagcgccacctccctgctaccccgcaggaaaattggtggcgttaa

SEQ ID NO: 114 - DNA, 1023 bp, Corynebacterium glutamicum
  source: /note="ncgl2449"
atgaatccagctcacatattttctgaaggtccaatcaatagtgttgttctcagccaggatgaggatggaaatttcaccacctcctaccaggacactttctctgatccatcatttttaggggaaggtgacgttctaattgaggttggatggtccagcctgaattacaaggatgcgatggctcttaagggtgataagggagtggtgcgcactgtgccgctgattccgggcatcgatgtggtgggcactgtgatcgagagcgctgatcctcgctttggtcgtggtgatgaagtggtgctgaatggcgctggtttgggggagaaccggcatggaggtttcacgcagcggctgaaagtgccgtctgaaccgttgctgcatattccatttaacttctccgcgcagcaggtgggtgcgttgggtactgcaggtttcacggctgcgctatcggtgaatgctctggtcgatcaaggtatcaaaccggaggatggggagattctggtaactggttcgactggtggtgtgggttcgattgcacttcacctgctgaataagttgggatatacgacggtcgcggtgacggggcgtcgagaagcgcatgccgaatacctgaccagcctgggcgcaagcgacatcattgatcgcgcggagctttctgaaaagggccggccgctgcagaaggggcgttgggcgggtgtagtggattcagtgggatcccacacacttgtcaatgcgattgcgcagacaaaatggggcggaattgtcacggcgtgtggcatggctcaggggccggatctgccgggaacggtgttgccgtttattcttcgtggcgtgcatttggttggcattaactctgtcgatgcaccccgtgagctgcgtcgacgtgcgtgggcgttgctgtccgagcatcttgataccgcggtgctagatgatatgaccactgtgattgatgtcaaggatgttgctcaagctggcgaagatttgatggctggcaagcttcacggacgtaccgcggtgcgtgttcattag

SEQ ID NO: 115 - DNA, 846 bp, Corynebacterium glutamicum
  source: /note="ncgl2472"
gtggatacccagcggattaaagatgacgaagatgctattcgttcggcgctgacatcgctgaaaaccgcaacaggcatcccagtcaccatgttcgccactgtgttgcaggacaatcgcctgcaaattactcagtgggttgggttgcgtaccccggctctgcagaatctggtcattgaaccaggtgtgggcgttggtggacgcgtcgtcgcaacccgtcgtccggttggtgtgagtgattacaccagggcaaatgtcatttcacatgagaaggattccgcgattcaggatgagggccttcattccattgtcgcagttcccgtgatcgtgcaccgcgaaatccgtggcgttttgtatgttggcgttcactctgcggtgcgtctcggcgacactgttattgaagaagtcaccatgactgcgcgcacgttggaacaaaacctggcgatcaactccgcgcttcgccgcaatggcgttcctgatggtcgcggttccctcaaagctaaccgcgtgatgaatggggcggagtgggagcaggttcgttccactcattccaagctgcgcatgctggcaaatcgtgtgaccgatgaggatctgcgccgcgatttggaagagctttgcgatcagatggtcaccccagtccgcatcaagcagaccaccaagctgtccgcgcgtgagttggacgtgctggcttgtgtcacgctcggtcacaccaacgtcgaagctgctgaagagatgggcatcggcgcggaaaccgtcaagagctacctgcgctcggtcatgcgcaagctcggcgcccacacgcgctacgaggcagtcaacgcagcacgccggatcggcgcactgccttaa

SEQ ID NO: 116 - DNA, 957 bp, Corynebacterium glutamicum
  source: /note="ncgl2473"
atgattggagcaccacccgacatgggcaatgtgtacaacaacatcaccgaaaccatcggccacaccccactggtaaagctgaacaagctcaccgaaggcctcgacgcaactgtcctggtcaagcttgagtcattcaacccagcaaactccgtcaaggaccgtatcggtctggccatcgttgaagatgcagagaagtccggtgcactgaagccaggcggcaccatcgttgaagcaacctccggcaacaccggtatcgcactggcaatggtcggcgctgcacgcggatacaacgttgttctcaccatgccggagaccatgtccaacgagcgtcgcgttctcctccgcgcttacggtgcagagatcgttcttaccccaggtgcagcaggcatgcagggtgcaaaggacaaggcagacgaaatcgtcgctgaacgcgaaaacgcagtccttgctcgccagttcgagaacgaggcaaacccacgcgtccaccgcgacaccaccgcgaaggaaatcctcgaagacaccgacggcaacgttgatatcttcgttgcaagcttcggcaccggcggaaccgtcaccggcgttggccaggtcctgaaggaaaacaacgcagacgtacaggtctacaccgtcgagccagaagcatccccacttctgaccgctggtaaggctggcccacacaagatccagggcatcggcgcaaacttcatccccgaggtcctggaccgcaaggttctcgacgacgtgctgaccgtctccaacgaagacgcaatcgcattctcccgcaagctcgctaccgaagagggcatcctcggcggtatctccaccggcgcaaacatcaaggcagctcttgaccttgcagcaaagccagagaacgctggcaagaccatcgtcaccgttgtcaccgacttcggcgagcgctacgtctccaccgttctttacgaagacatccgcgactaa

SEQ ID NO: 117 - DNA, 1146 bp, Corynebacterium glutamicum
  source: /note="ncgl2481"
gtgactctaaaaatcggcccctttgaccttgcctcccctgtggttctagcccccatggctggtgtaaccaacgttgctttccgcacgctgtgccgcgaacaggaaatgcaacgcacgggaacaatctcggggctgtacgtctgtgaaatggtgactgcgcgtgctcttgttgagcgcaatgagaaaaccatgcacatgaccaccttcgcgccggatgaaaatccccgaagcttgcagctgtacacggttgacccgaagtacacctacgaagcggcgaagatgatcgttgatgaaaacttggcggatcatattgatatgaactttggctgcccggttccaaaggtcacgcgccgtggtggcggttctgcgattccttacaagcgccgtttgtttgaaaacatcgtttccgcggctgtgaaggctacggaaggcacggacattccggtgacggtgaagttccgcgttggtattgatgatgagcaccatactcacttggatgctggacgcattgctgtcgacgcaggcgccaagtccgtagcgcttcacgcccgcactgcggcgcagcgctattccggtgaggctgattggaacgagatcgcgcgcctgaaggagcatttggcagataccggcatcccagttttgggcaatggcgatattttcgcggcatccgatgcaacgcgcatgatggagcaaactggctgcgatggcgtcgtggttgggcgtggttgcctgggcaggccttggctctttgctgagctgtctgctgctgttcgtggagaagaaatcccagaggagcctaccttcggcgaagttacccaaatcatcctgcgccacgcagaactcctcatgcagcatgatggcgaaaccaaggggctgcgcgatctgcgtaagcacatgggttggtacctgcgcggtttccctgttggcggcgaattccgctccaatctggccaaggtttccacctatgtggagcttgaggatctccttgcaccatgggctgactccaccgccaaggcagaggacgcggaaggtgcacgaggtcgacagggcgctcctgcaaaggtggcacttccagatggctggttggacgatcctgaggatgccactgttcctaaaggcgcagaaatggaaaactccggagggtag

SEQ ID NO: 118 - DNA, 945 bp, Corynebacterium glutamicum
  source: /note="ncgl2491"
atggcgcttgaaccacaaataaagtctgcaccgacgccggtgatcttaattgtcgaaccctacggcgggtccatccggcaacaaaaccccaacctaccaatggttttttgggacgatgcagctttaacccgaggcgatggcatctttgaaacactcctcatccgcgacggacatgcctgcaacgtgcgccgacacggagaacgcttcaaagcatcggcagcactattgggactgccagagccgatcctggaagactgggaaaaagccacccaaatgggcatcgattcctggtactcccaccccaacgcaggcgaggcctcatgcacctggacgctcagccgaggtcgttcctccacggggctggcctcaggatggttaaccatcaccccagtctcctccgacaaactggcgcaacgtgaacacggtgtatcggtcatgaccagttcaagaggatattccatcgacaccggcctccccggaatcggaaaagccacccgaggcgagctatctaaagtggaacgaacccccgcaccatggctgacagtcggcgccaaaacactggcctacgcagcaaacatggcagccctgcgctacgccaaatcaaacggattcgacgacgtgatcttcaccgatggcgaccgcgttctagaaggcgccacctccaccgtagtgagtttcaaaggcgacaaaatccgcaccccttcacccggtggcgacattctccccggaaccacccaagcagcactctttgcacacgcaaccgaaaaaggatggcgatgtaaagaaaaagacttaagcattgacgatcttttcggagccgacagcgtgtggctagtgtcctccgtccgcggaccagttcgggtgaccaggctcgatggacacaaattacggaaaccagacaatgaaaaagaaatcaaggcgctgattaccaaagctctggggtag

SEQ ID NO: 119 - DNA, 690 bp, Corynebacterium glutamicum
  source: /note="ncgl2505"
atgtccggccggcttcttgtttcagtttctagtattttcgaccagacccgctcggcggctgacaggatcatctcagacctgcgagccgacggcatcgaggtctcattacttgtcgcaccccgcatcgacggggactggcgtctcgccaaagacaaagggaccctcgcgtggatggaacaacaacgcgaacgcggccacgaactcatcctcaacggtttcgaccaagcagttcagggacgtcgctcagaattcgccaaccttgaacggcacgaagcacgtctacgtctcaccggtgctattaggcaaatgcagaaaattggcttcgaattccaaatctttgccccacctcgttggagaatgtcagaaggcaccttcgcggtactcccagaatttgatttcaacgccgccgcctcgaccaggggattacataacctcgacaccggcgaattcttggcgtgtagaaacctctccgtgggtgaaggttttggtgctgcaaaatggtggcgcaagaatgtcatcaaggctgtcactcgtggagcggaaaaaggaaatacagtgcgcttgtccgcatcggcgcgaaatctcaccaaccctaaagtcgcagctgacttccgggaagctgcattagctgccctggatttgggtgctcaggtgcaaacgtattctcaggcggccgcacaactggcctag

SEQ ID NO: 120 - DNA, 700 bp, Corynebacterium glutamicum
  source: /note="ncgl2527"
gtggagattcgttggttggaaggctttattgcggtcgcggaagaattgcactttagtaatgctgcgattcgtttggggatgccgcaatcgccgttgagtcagttgatccggcggttggagtcggagttggggcagaagctttttgatcgcagtacccggtcggtggagttaactgccgcgggtcgggcgtttttgccgcatgccagggggattgtggcgagcgctgcggtggcgagggaagctgtgaatgctgccgagggggagatcgttggtgttgttcgcattggtttttctggtgtgctgaactattccacgctgccgattttgaccagtgaggtgcataaacggcttcctaatgtggagttggagctcgttggtcagaagttgacgagggaagcggtaagtttgctgcgcttgggggcgttggatattacgttgatgggtttgcccattggggatccagagattgagactcggctgattagtttggaagagtttcgcgtggtgttgccgaaggatcatcgtcttgcgggggaaggagtggtggatttggtggatctggctgaagatgggtttgtgacgacgccggagtttgcggggtctgtgtttaggaattccacctttcagttgtgtgctgaggctggttttgtgccgaggatcagccagcaagttaatgatccttacatggcgctgttgttgg

SEQ ID NO: 121 - DNA, 1458 bp, Corynebacterium glutamicum
  source: /note="ncgl2535"
atggatgattccaatagctttgtagttgttgctaaccgtctgccagtggatatgactgtccacccagatggtagctatagcatctcccccagccccggtggccttgtcacggggctttcccccgttctggaacaacatcgtggatgttgggtcggatggcctggaactgtagatgttgcacccgaaccatttcgaacagatacgggtgttttgctgcaccctgttgtcctcactgcaagtgactatgaaggcttctacgagggcttttcaaacgcaacgctgtggcctcttttccacgatctgattgttactccggtgtacaacaccgattggtggcatgcgtttcgggaagtaaacctcaagttcgctgaagccgtgagccaagtggcggcacacggtgccactgtgtgggtgcaggactatcagctgttgctggttcctggcattttgcgccagatgcgccctgatttgaagatcggtttcttcctccacattcccttcccttcccctgatctgttccgtcagctgccgtggcgtgaagagattgttcgaggcatgctgggcgcagatttggtgggattccatttggttcaaaacgcagaaaacttccttgcgttaacccagcaggttgccggcactgccgggtctcatgtgggtcagccggacaccttgcaggtcagtggtgaagcattggtgcgtgagattggcgctcatgttgaaaccgctgacggaaggcgagttagcgtcggggcgttcccgatctcgattgatgttgaaatgtttggggaggcgtcgaaaagcgccgttcttgatcttttaaaaacgctcgacgagccggaaaccgtattcctgggcgttgaccgactggactacaccaagggcattttgcagcgcctgcttgcgtttgaggaactgctggaatccggcgcgttggaggccgacaaagctgtgttgctgcaggtcgcgacgccttcgcgtgagcgcattgatcactatcgtgtgtcgcgttcgcaggtcgaggaagccgtcggccgtatcaatggtcgtttcggtcgcatggggcgtcccgtggtgcattatctacacaggtcattgagcaaaaatgatctccaggtgctgtataccgcagccgatgtcatgctggttacgccttttaaagacggtatgaacttggtggctaaagaattcgtggccaaccaccgcgacggcactggtgctttggtgctgtccgaatttgccggcgcggccactgagctgaccggtgcgtatttatgcaacccatttgatgtggaatccatcaaacggcaaatggtggcagctgtccatgatttgaagcacaatccggaatctgcggcaacgcgaatgaaaacgaacagcgagcaggtctatacccacgacgtcaacgtgtgggctaatagtttcctggattgtttggcgcagtcgggagaaaactcatga

SEQ ID NO: 122 - DNA, 1083 bp, Corynebacterium glutamicum
  source: /note="ncgl2538"
atgattatgggtaggaaacaacaatacggaaccctcgcgtccatcgccgcgaaactaggtgtctcaaggaccacggtgtctaatgcctacaaccggccggagcaactctccgcagaacttcgccaacgcatcctcgacaccgctgaagatatgggctatctcggccctgatccggtggcccgcagccttcgtacacgcagagcaggcgcgatcggtgtgctacttaccgaggacctcacttatgccttcgaagatatggcctccgtggactttcttgccggggtggctcaagctgctggagacacccaactaacgctgattcctgcctcgcccgcgagcagcgttgaccatgtctcggctcaacaattagtcaacaacgctgcagttgacggagtggttatttactccgttgccaagggtgatccacacatcgatgccatccgtgcccgtggtttgcccgcagtcatcgccgaccagcctgcacgcgaagaaggcatgccgtttattgccccaaataaccgcaaagccatcgcccctgcagctcaagcgctaatcgacgccggccaccgcaaaatcggcatcctgtccatccgcctagaccgcgcaaacaacgacggcgaagtcacccgcgagcgcctcgaaaacgcccaataccaggtacaacgcgaccgagtcaggggtgccatggaagtctttatcgaagcgggaatcgatcccgacaccgtgccgatcatggaatgctggatcaacaaccgccaacacaacttcgaagtggccaaagaacttctagaaacacacccagacctcaccgcagtactctgtaccgtcgatgcactggcattcggcgttctggaataccttaaaagcgtaggtaaatcagcgcctgcagatctatccctcactggtttcgatggcacccacatggcactcgcacgggatctcaccaccgtcatccaacccaacaaactcaaagggttcaaagccggcgaaacactgttgaaaatgattgacaaagaatacgtggaaccagaagtggaattggaaacttcctttcacccaggttccacggttgcgccaatctag

SEQ ID NO: 123 - DNA, 3862 bp, Corynebacterium glutamicum
  source: /note="ncgl2559"
atggacttaaatactcaacgctcaaagctctacgcacagcttcaaggccagctcattgtttccgtgcaagctcccgacagccatgccatgcgagggtgctgttgcaaagttgggccagggtcgaaaagcccaacctcaagacattagttgtccttgctccggagtacttaagctgtctcgaatatccggctgacgatcaccgcgtctgggttcgggtgcccgtaggcaaacatcgtgccctggcctttccgcaatgaatgcatcgcttccatccctttcaacgtccggtaggcggaaattcggtttttgaacgctcccttcggccccaggattcttttaagtcggccatgatctccctcgataacgttgttgaggtatttcacctgccggtgctccaccgtctgagggcagattccctccgccttcagctcggatattgccttggccagagctggtgccttgtcggtgttgatgacccgcggggacccggctgtcgtattcgatcgcagcgtcttggccaggaaacgcttggccgcagccacattccgttttggtgagagataaaagtccaggatatgcccaccaacggtgttcgccaggtcacagatagcaccgcttcccgccgacccggatataggtctcatccacccgccaggaacttagcctgccagtcaggtacctgccggtaccagcgagtctgcttatccagctcaggggcgtatttctggacccagcggtgagaatcgtggtgtgatcgaccggcacgccccgctgaagtcatcatttcctcgagatcttaggtcagctcaccccgtagcggcagtgacctgcgcaccgcccacagaatgatgtcacgggggaaatgccgaccggagaagatacccatggctgtgattatttcacgccggtctttctactgccccaactttgcaacaacaccctgctgggtgcccgtgctttccggcactggaacctcaccgccacctgatcccggatcagacgttcgcggtgtcactgtcgcggtcctcgtccgtctcatcgtccaggatgccgcgggcacgctcgacggcaggcagggaatgatcggcagcggccgtcaccaggtcctcgaccatggtgcgcagcagcctcggaatcatcgcagaatccgccccgtagagatggatctcacggatcacctcatagagcatgtccgcgatacgttgcggctggtgcaccacacggacccgaccgtcgtcatcggcgatgtaggggctgggctcgatgacggtgaccaaatagcggaagatccggtggatctcctggacacactgggccgccgtggccggatcattgatgcccggggacaacgcacgatcggcaatgtcgaccagttgacgcagtccgaacgccacatcctggtgaagttcccgctcggtccgcacctcgatggccgagtgcagaacgcgtcggtcccggtcgctgagttccccgtcccaccagacccgcagcagcggctggccctcgacgaggaagtcccccaccggccggtcgaccgtgatcaccgcctggtgttccgtcgaccaggacaccagcttccggtagtcgatccacaccagcgaaccatggctgcccacccggatttcttcccgggggtcaccgggccgcggtgaccagcccggcccctggactgggcctgcgtcgtcgctctgcacgggatagatacgtgcggccagagccatcgtctcctccccgatctcggagatggcgttggccacccgcatcgagaaggtgatgagccggatgaacgccaggaacagtcccagacacccgagcaccagcaggaaggcaaccgacactgaagcacgggggacgaatccggtgatgtcctcgtcctcgctccacacgtaccggatgaccgtcagggagaacacgaacgtccccaggaacatcgccagggtggcctgcacgatgcggttgcgcagaaagccgttgagcattcgcgggctgaactggctgctcaccagctgcaaaacaacgagagtgatggagaagatgagaccggtcactgagatcgtggaggcggcgatggtgcccagcacctcgcgggcggcatcaggcccaccctcaaaaacgaatttgagcgcggcgtcggacaacccacgttcccacgtgggaagcaggaaaccgaaaaccagggccgcgaccacgctggcagccggtatcgcccagaagggccgccacagccggtcccaccgcgtctcccggggaatgtccgggatcgaaccgcggatgcggaaactctcggaggtaccagtagtaccgtggtcgtttttcttcaccacaccattatggcattgacgacggttctcagtgcgcactcagccgacttgttccacccgccttcacaacagaaaacggctgttgtggcgacgtcggggcagtaggatcctcggcgtgaaataattaaggccatgagtctcttctcgggtcgtcatttccctcgcgagatccatcctgtgggcggtgcacaggtcactgccgctacgggctcagctgacctaagatctcgaggaaatgatgacttcagcgcggagtgccggtcgatcaccccaccatctaccgctgggtccagaaatacgcccccgagctggacaagcagacccgccgataccggcaggtacctgactggcaggcaagctcctggcgggtagatgagacctatatccgggtcggcggcacgtggtgctatctctaccgggctattaccgccggtgggcagaccctggacttttatctctctccgaagcgcaatgtcgcggcggccaagcgtttcctggccaagacgctgcgatcgaatacgacagccgggtccccgcgggtcatcaacaccgacaaggcaccagctctggccaaggcaatatccgagctgaaggcggagggaatctgccctcagacggtggagcaccggcaggtgaaataccttcaacaacgtgctggaaggtaaccatgggcggttgaaacggatcctcggaccgaagggggcgttcaagaattggatgtctgcgtgacctgtcactcaaggggatggaggtgatgcactcattgagaaagggtcagggaacgatgttcgcctacgggcagtcgaacccagacgcggtgatcatcaaccgggtctttgagacagcttggacacgctggcacacggtacccatcaggagatgaaaaactgagtcttcacggttccccgcccaactttgcaacagcacccatgcgagatacccatacgctcacccatgtggccgcagcctgtgtcgatggcggtgctcctgccattcgctgtggcggttacggcggtttggaagatatccgttcaatctccaaccgtgtcgacgttcccgttttcggactcaccaaagaaggctccgaaggagtttacatcaccccaaccagggattccgttcgagcagtggcagaatccggcgccactgtagtctgcgcggatgcaactttccgacctaggcctgacggctccacctttgcagagctggtcactgttgcccacgattccggaattctcatcatggcggactgcgcaactcccgaagaagttctcagtgcgcataaggctggcgcggattttgtgtccaccacgcttgccggatacaccgaacaccgcgagaaaacagtcgggccagatttcgattgcctccgcgaagcccgtgagttagttccagatgcgttcctcattggcgaaggccgcttctccaaccctgcggatgttgcacacggtcgtctcattggtgccaacgcgatcatcgtgggcaccgcaatcactgaccctggtatcatcactggacagttcgcgtcactgttgcactag

SEQ ID NO: 124 - DNA, 501 bp, Corynebacterium glutamicum
  source: /note="ncgl2567"
atgaatgaatttcaaatgaaacaagatcaatctccaaaattagattcggcagattggaaaatcctcgaacttttacaggtcgatgcaacaatgccgaacaaggacatcgcagccaaagtcggtatcgcaccgagcacctgtctagaacggatccggcgaatgcgacgaaatggaacaatcgtagccacccgtgcgcacgttcgcccaagtttgttgggtagaggtgaacaggcttttcttggcatccaaatccgaccccacgcccgtgatacagccaatgactttgtgcaaaaagtactcgcacttcccgaaaccctcgcgctctacaacgtcagtggcagcgaagactatcttgttcatgtcgccgtagcgaacagcaccgaattacaatctttgatcatcgataaactgctcgcactgccacaggtcgcacactgtcgaacacaactgattttcggtgagccttgggtcgctccgcttcgacaaagcgaccgacaataa

SEQ ID NO: 125 - DNA, 483 bp, Corynebacterium glutamicum
  source: /note="ncgl2569"
gtgactaacccaatcatcccccgcgtaggaatcgccacagacgcccaccaaatcgaagcgggaaaaccctgctggatcgcctgcctcctctttgaaggcgtcgacggctgcgaaggccactccgacggtgatgttgtagctcatgcaattgtggatgctctcctttctgcctctggtctgggggatttgggctctttcgttggtgtggggagacctgaatacgatggtgtttctggtacacagttgttgaaggaagttcgggagctgctttcggcacacgggtacgtcattggaaatgtcgccgcccaactggttggccaaacccccaaatttggaccccgccgcgaagaagcacaacaagtcatctccgacatcatcggcgcaccatgctcactgtctgccaccaccactgatcacatgggattcactggtcgcagcgaaggtcgtgcatcggtagcaacagcggtggtgtggaaggcttaa

SEQ ID NO: 126 - DNA, 1101 bp, Corynebacterium glutamicum
  source: /note="ncgl2576"
atgacaccaacaaccactcctgtatcaaacccagatgccctttccactggaactcaggatgtgcacaccctcaaaggaacgttgcagcgcctcgccccaggcacaccacttcgcgatggcttagaccgcatcgtccgaggacacaccggcgcgttaatcgtcattggtgatgatgaaaacgtctcctcgatctgcgacggcggctttgaattcgacgtttcgtttgctgcaacccgactccgcgagttgtgcaagatggatggcgctgtcattttgtcttccgaccttgagcgtatcaaacgcgccaatgttcagctgctgccttcaccaacctggccaacccaggagtccggcacccgccaccgttctgcagaacgcaccgcgcttcacaccggtgtgccagtgattgcagtatccgaatcacaaaacaccatcactctctacgtcgagggcaaatcccacatgttggagcagccagctgcgctgcttaaccgcgccaaccaagctttgggaacaatggagcgctaccgcgatcgtctcgatcaggtcaataaccgccttcacctggctgaactccacagctatgtcaccgtgattgatgttgtttctgtcattcagcgcgaggaaatgctgcgccgagtgggtgaaaccattgatggcgatgttcttgaactaggcaaagacgccaaggagattcagatccagctcagcgaattacgtggcgataatgaccgagaacgtgaatcaatcattgctgattacctcgtcaccgacggtattcctgcagatgaggaaatccacacagccctcgaagcgatctcacatttagatgataaggctctgctgaatcctgcgaacatcgcgcgtgttcttggactgccaccgaccgaggaagcacttgatgagccagtcgctcctcgcggctaccgcacgctcaacagaattcctcgagtgcaaaaattcctcatggataaactcatcgtggaattcggcaacttggatgcactgctcaatgcatcagtagaggatctaagtgcagtcgatggtgtgggttcactgtgggcacgccacatcaccgacggacttggacgcttaagttag

SEQ ID NO: 127 - DNA, 1014 bp, Corynebacterium glutamicum
  source: /note="ncgl2587"
atgactgctcaaccagcccacgagctgccaaggcatctccggttcagtacgagcgggatcctcccggacaatcgcgtccaaatgtgggagagccacaatgcccgcgcattgcttccgctcgacattagaaccattgacgatcgccccatgcaggcctccgaaaccaacctgcacctcccatcaatgcggatggcgagcgtattcgggacttcgcaatttgtcgagcgttcagagagtttcatctcagaaaaccccacgggtgtggttgcgatcttctttgcgactgaaggcgaagcagtcttcttccaccgtggtgggcatatagcacttcgcccaggtcaggccattgtttacgacgctgaccgaccatttctccgcggattcaacaatcgtttccgcgagctagttctcacgattccgaagcagcgttaccttgaaattgttggcacaaaaggacctgagcttcccgctatttttgagttcggagcaacaggaacggccaccgaacaagctttagcgcggctagttcaggaatccctgcacaggatcgagcgtggcgagccggaacatatcgattccagcggacctttaggaaaaccgtggagtgatatcgaaaacgaagctcagggacttatccgcaatgtgcttggcgacgccacaagtagcgaagagggcttaatttctgcagcccagagatttattgacatcaatatttccgatagtggcttacaagcgtcgcggatcgccgcagccgtcagaattagcgaacgccaactaagtcgaatcttctcagaatcaggacaaactatcggacgctacgtcctaaacacccgactggattttgcaaaggaagcgctgtcgacaccggagcgagacaaggtttcggtcagtgagatcggtaagcgctttgggttcgcttctccaagtcatttcagtcgcaccttccgtgagcggtttgaaatgacgccgcttcaatggaggaaggaatcgcagcgtcaatcctttcaagagtga

SEQ ID NO: 128 - DNA, 267 bp, Corynebacterium glutamicum
  source: /note="ncgl2614"
gtggatatcgtgtcttctatctttgctccgattctgggacccatggctggtgttggtatcctcaaaggccttctagctgttgcagctgcagcgcactcggtggatacgacatccacgacctatcaaattctttatgctgcaggcgatgccttttcatgttcttggcagtcattttggcgattactgcggctcgtaaatttggtgccaatgtctttacatcagtcgcactagctggtgcattgctgcacacacagcttcaggcagtaa

SEQ ID NO: 129 - DNA, 1277 bp, Corynebacterium glutamicum
  source: /note="ncgl2669"
atggctgcaatcgttattgtcggcgctcaatggggcgatgaaggcaaaggtaaggccacggatattctcggcggactcgtcgattacgtggttaagcccaatggcggtaacaacgctggacacactgttgtggtcggcggcgagaagtacgagctaaagctccttcctgccggcgtcctctccgaaacggccaccccaattttgggcaacggcgttgtgatcaaccttgaggcactgttcgaagaaatcgacggccttgaggctcgcggtgcggatgcatcccgcctgcgcatctctgcaaacgctcacctggttgctccataccaccaggtgatggaccgtgttcaggaacgcttcctgggcaagcgtgcaatcggcaccaccggccggggcatcggccctacctacgcggacaaggtgtcccgcgtgggaatccgtgttcaagacattttcgacgaatccatccttcgtcaaaaagttgagtctgccctggattacaagaaccaggtcctggtgaagatgtacaaccgcaaggccatcgtcgctgaggaaatcgtgcagtacttcctctcctacgctgatcgtctgcgccccatggtcatcgatgccaccttggtgctcaacgaggcacttgatcagggcaagcacgttcttatggaaggtggccaggcaaccatgctcgacgtggaccacggcacctacccattcgtcacctcctccaacccaaccgccggtggcgcaagcgttggttcaggtatcggcccaaccaagatcaccagctctttgggcatcatcaaggcctacaccactcgtgttggtgctggcccattcccaactgagctgtttgataagtggggcgagtacctgcagaccgtcggtggcgaggtcggcgtgaacaccggccgtaagcgtcgctgtggctggtacgactccgtgattgctcgttacgcatcccgcgtcaacggattcaccgactacttcctgaccaagctagacgtgctcaccggcatcggtgaaatcccaatctgcgtagcttacgacgttgatggtgttcgccacgatgaaatgccactgacccagtcagagttccaccacgcaaccccaatctttgaaaccatgcctgcatgggacgaagacatcaccgactgcaagaccttcgaggatcttccacaaaaggcccaggactacgtccgacgcctggaagaactctctggtgctcgcttctcctacatcggtgttggacctggtcgcgatcagaccatcgtcctgcatgacgt

SEQ ID NO: 130 - DNA, 390 bp, Corynebacterium glutamicum
  source: /note="ncgl2684"
ttgtgcaataatctgcgtatgaatgcagataagaaaatgtgcggaatgaacccggatagccaatacgtcgaacttgccgtcgaagttttcggactcctcgcggacgccactcgagttcgcatcatcttggcgcttcgaaacagtggtgaactttccgtaaaccacctcgcggacatcgtcgataaatcccccgcagcagtttcccaacacctcgcccggctgcgcatggcccgaatcgtgtccacccgccaagaaggtcaacgagttttctacaaactcaccaatgaacacgcatcacagctagtctccgacgctatttttcaggcggaacacaccattgcggacggccagactcccccacaccaccaccgagaacgagaacaatcatga

SEQ ID NO: 131 - DNA, 441 bp, Corynebacterium glutamicum
  source: /note="ncgl2699"
atggcatccacaccgaaagaatccaacgatgaaggtcagtttgaccgtgtcgattttcagggggaagtcttcgttatctctgttgcagccgagcttgccggcatgcatgcccaaactttgcgaacctacgatcgcatgggtttggtcaccccgatacgcactcgcggaggcggtcgccgttactcccgcgctgacgtggaattactccgagaaattcagcacctcagccaggaggaaggcgtaaacctcgccggaatcaaggcgatcatcgaactcggcgaagaaaaccgaaacctcaaagaatccctgcgtaaggtcacagctgagaatgagcagctcaaagatcaattacgcagcgggcgtccgcgtggcgagctggtgcacgtgccccgctccaccgcggtggtcatgtgggaacgccgcaaggggcgttccaagtaa

SEQ ID NO: 132 - DNA, 1857 bp, Corynebacterium glutamicum
  source: /note="ncgl2702"
atgggacgtgcagtaggaattgaccttggaaccaccaactctgtggtttccgtacttgaaggcggcgagccagtagttatcgcaaacgcagaaggctcacgcaccaccccttccgtcgttgcattcgcaaagaacggtgaagttctagtcggccagtccgctaagaaccaggcagtcaccaacgttgaccgcaccattcgctccgtcaagcgccacatcggcaccgactggtccgttgctatcgatgacaagaactacacctcacaggaaatctcggctcgtaccctgatgaagctgaagcgcgacgctgaagcatacctgggcgaggacgtcactgatgctgttattaccgttcctgcatacttcgaggactcacagcgccaggcaaccaaggaagctggccagatcgcaggccttaacgttctgcgtattgttaacgagccaaccgcggctgcacttgcatacggccttgagaagggcgagcaggagcagaccattctggtattcgacctcggtggcggcaccttcgacgtctccctcctagagatcggcgacggtgttgttgaggttcgcgcaacctccggcgataacgagctcggtggcgacgactgggatcagcgtatcgttgactggctggtagagaagttccagtcctccaacggcatcgacctgaccaaggacaagatggccctgcagcgtctgcgtgaggcagctgagaaggcaaagatcgagctgtcctcttcccagagtgcaaacatcaaccttccttacatcaccgttgatgcagacaagaacccactgttcttggatgagaccctttcccgtgccgagttccagcgcatcacccaggacctcctggcccgcaccaagactcctttcaaccaggttgttaaggacgctggcgtgtccgtctcggagatcgaccacgttgttctcgtcggtggttccacccgtatgcctgctgttaccgaactggtcaaggaactgaccggtggacgtgagccaaacaagggtgttaacccagatgaggttgttgcagttggtgcagcacttcaggccggtgttctccgcggcgaggtcaaggatgtgcttcttcttgacgtcaccccactgtccctcggcattgagaccaagggtggcgtgatgaccaagctcatcgagcgcaacaccaccatccctaccaagcgttccgagaccttcaccaccgcagaggataaccagccttctgttcagatccaggtcttccagggcgagcgtgaaatcgcaaccgccaacaagctgctcggatccttcgagctcggcggcatcgcacctgcaccacgtggcgtcccacagatcgaggtcactttcgacatcgacgccaacggcatcgtccacgtcaccgcaaaggacaagggtactggcaaggaaaacaccatcaccattcaggacggctccggtctctcccaggatgaaattgatcgcatgatcaaggatgctgaagctcacgctgatgaggacaagaagcgccgcgaggagcaggaagtccgcaacaacgctgagtccctggtttaccagacccgcaagttcgttgaagagaactccgagaaggtctccgaagaccttaaggcaaaggtcgaagaggcagccaagggcgttgaagaagcactcaagggcgaggacctcgaggcaatcaaggctgcagttgagaagctgaacaccgagtcccaggaaatgggtaaggctatctacgaggctgacgctgctgctggtgcaacccaggctgacgcaggtgcagaaggcgctgcagatgacgatgttgttgacgctgaagttgtcgaagacgacgcagctgacaatggtgaggacaagaagtaa

SEQ ID NO: 133 - DNA, 447 bp, Corynebacterium glutamicum
  source: /note="ncgl2755"
atgaccgacaaaaccatgctggttgcttttgatggctcaccggaatcccggcgcgctttggaatatgcagcgaaattgttgcagccgcgcaccgtggaaattttaactgcgtgggagccattgcatcggcaagctgcgcgctcggtttcgttgatcaccttgggggtggaacccgaagaccccgcccattccgctgcactaaaaacctgccaggaaggcgtagagctggcccaatctctaggtctggaagcgcgagcccacatggtggaatccgcaacggccgtgtggagcgccatcgttgatgctgctgacgagctccgacccgacgtgattgtcaccggcacccgcgggatctccggatggaaatccctgtggcaatcctccacctcagacagcgtgctccaccacgccgacgtaccagtttttgtcgttccgccgctggactaa

SEQ ID NO: 134 - DNA, 2133 bp, Corynebacterium glutamicum
  source: /note="ncgl2789"
atgctcgctattattttgaccgccgtattgggcgcatctggccttgcagccgctggcactcagtacctcaatactcagggcgaaggcatcggtccggtcgccgtccaaaacgacagtgaatcgtttaattccggcaccaacgtggttgttgaagacgcagcagtcaccgcccagggtgaaggcggaggcgctcgcaccgtcaaggaattccagcgtgaccagcaattctctagttttgctcttacctggaccggtaaaaaagacatcactgcttttgttcgcgcagaacaggaagacggcacctggtcacagtggtacgacttggagccaatggtcaatgaagatcaaggcaccaacggaactgagctgatctggcacggccctaccaacaagatccaggtttccaccctcaacgtggatctctttggagcagatgctgcagccgctgatgaaaacggtcaagacattccagcagtagatgcagccgaggcagcgccagcagcagaacctgcaccagctgaagcgccagtcgaggaagctcctgcacctgtcgcagaaccagcaccagctgctgaacctatcgctgagccagtcgctgattactcagcaaatgacggcctcgctcccctgccatccaactatggcgacatccagcctgttgccgatgttgatgacggcctaaacgcagtatttatcgatggcaacgctgatgcaggcgtgggtatcgctaacgttgctgacaccgatggcatgccaaaggtgatttctcgtgctggttggggtgcgaacgaaagtctgcgttgctcaaacccaacgattgataaggatggcgtttctgcaatcaccattcaccacactgcgggttccaacaactacaccgaggcgcaggctgcagcccaggttcgtggtgcttacagctatcacgctcagacccttgggtggtgcgatatcggataccaatcgctggttgataagtacggcaacatctacgaaggccgtgccggcggcatgaccaatgctgttcagggtgctcacgctggcggcttcaaccagaatacttgggcaatctccatgattggcgactattcctacaacgctccccctcaggaaaccatcaatgctgtcggtgagcttgcaggttggcgtgcaaaggttgcaggtttcgacccaactgggactgatactcactactccgagggcacttcttactccaaggtcccctatggccagtcagtgaatctgcctaatatctttgcgcaccgcgatgttggatacaccgcatgtcctggcgatgccggctatgcgcaaatgggtaatatccgccagatcgctaaggcaaagtacgacagcctgcaaagcggcaacactggtggcacgaccaccgcagcgtcaacgccgaaggaaacgtcgacaagcaatgctccttcgacgaccaccccggcgacaacgccgaaggagacgtcgacaagcaatgctccttcgacgaccactgcccagcctgtaactcccgctgaacctcagcagtacagcgagtccgatgccctggcagctctgctaacaggtggttcttccggtggcacagacctgctcaatggcgcaaactctgagcagctcctgactggcctgggttccattgcggctgtgctgattgctgcgtctttagctgatggtggcctgaatggtctgatcagcaatgttggtagcaacaatggcgtcccggtgcttggcgatatcaagatcactgacgtcatcccaatcgttgatacagtgatcaatctgactggcgagaataagtactctcgcggttggaacgacctgaacaacacgcttggaccagtgcttggcgctgccactggtggcgaaaccaccgtgaagtacaccagcgaccagaactctgaggttactttcgtgccgtttgaaaatggcatcatggtgtcttcccctgaggctggaactcacggcctgtggggcgcaatcggtgacgcgtgggctcagcagggcgctgaccttggccctctgggacttccaaccagtaatcagtaccagtctggtgatctgctgcgcgttgatttccagaacggttacatcacttacgattctgcgactggccaggcaagcattcagctgaactag

SEQ ID NO: 135 - DNA, 1530 bp, Corynebacterium glutamicum
  source: /note="ncgl2790"
atgagaatctcaaaggccaatgcgtatgttgcagcgattgaccaaggcaccacttccactcggtgcatcttaattgacgcccaaggaaaagtggtgtcttctgcttccaaggagcaccgccaaatcttcccacaacagggctgggtagagcacgatcctgaagaaatttgggacaacatccgatctgtcgtcagccaggcgatggtctccattgacatcaccccgcacgaggttgcatcgctgggagtcaccaaccagcgcgaaaccaccgtggtgtgggacaagcacaccggcgaacctgtctacaacgcaatcgtgtggcaagacacccgcacctctgacatttgcctagagatcgcgggcgaagaaggccaggaaaagtggcttgaccgcaccggcctgctgatcaactcctacccatcggggcccaaaatcaagtggattctcgacaacgttgagggagctcgcgaacgcgcagaaaagggcgaccttttgtttggcaccatggatacctgggtgctgtggaacctgaccggcggtgtccgcggcgacgacggtgatgatgccatccacgtcaccgatgtcaccaacgcatcccgcacactattgatggatctccgcacgcaacagtgggatccagaactatgcgaagccctagacattccgatgtccatgctccctgagattcgtccctccgtcggagaattccgctccgtgcgccaccgcggaaccctagccgacgtccccattactggcgtgctcggcgaccagcaagcggccctttttggtcagggcggattccacgaaggtgctgctaaaaatacctacggcaccggcctcttcctgctgatgaacaccggcacctcgttgaagatttccgagcacggcctgctgtccaccatcgcctatcaacgggaaggatccgctccggtctacgcgctggaaggttccgtatccatgggcggttccttggtgcagtggctacgcgataacttgcagattattcccaatgcaccagctattgaaaacctcgcccgtgaagttgaagataatggcggggtccatgtggtccctgcattcaccggactgttcgcaccacgttggcgccccgatgctcgtggcgtcattacaggcctcacccgttttgccaaccgcaaacacatcgcccgcgcagtccttgaggctaacgcctttcaaacccgcgaagttgtggaagccatggccaaagacgcaggtaaagccctcgaatccctccgcgtcgacggtgcgatggtggaaaatgacctcctcatgcaaatgcaagccgacttcctcggcatcgacgtccaacgtctcgaggacgtagaaaccaccgcggtcggcgtcgcattcgctgcaggtctcggctctggattcttcaaaacaactgacgagatcgaaaaacttattgcagtgaagaaagtctggaaccctgacatgagcgaagaagagcgcgaacgtcgctatgccgaatggaatagggcagtggagcattcttatgaccaggcctag

SEQ ID NO: 136 - DNA, 1038 bp, Corynebacterium glutamicum
  source: /note="ncgl2802"
atgcctcctaggcaaaccccaccgaggcaggttcccccacaacagcagtaccagcagcctggtcagatcggacaccttcgcccgcagccgccagtgattacaaatggtggagggagacgtcgaaaagcaatatcttttaagccccgtggctgccttggctcgctcgcgggcctggttgctgtggtgctggtgctcgcttttgtggtcgcgctgtgggcggatgccaagctgaatcgcgtggatgcgacgcccgcgacgcaggtggcgaataccgcaggcacgaactggctgctggtgggttcggactcgcggcagggtttaagtgatgaggatattgagcggctgggtaccggcggagatatcggtgtgggtcgtacggacacgatcatggtgttgcatatgccgcgtactggcgagccgacgctgttgtcgattccgcgtgattcttatgtcaatgtccctggctggggcatggataaggcaaacgcggcgttcactgtgggtggcccgcagctgctcacgcagaccgtggaggaggcgactggtctgcgaattgatcactatgcggaaatcggcatgggtggtttggcgaacatggttgatgccgtgggcggcgtggaaatgtgtcctgctgagccgatgtatgatccgctggccaacctggatattcaagccggctgccaggaatttgatggggcgaccgcgctgggatacgtgcgcactcgtgccacatccctgggtgatctggaccgcgtggtgcgccagcgggagtttttctccgcgctgctgagtacggctacgtccccgggcacgttgctgaatccgttccgcaccttcccgatgatctccaacgcggtgggaacattcaccgtcggcgagggcgatcacgtgtggcacctggcccgattggcgctggcgatgcgcggaggaatcgtgacggagaccgtgccgattgcctcattcgcagattacgatgtgggaaatgttgcgatctgggacgaagctggagccgaagcactatttagctccatgcgctaa

SEQ ID NO: 137 - DNA, 927 bp, Corynebacterium glutamicum
  source: /note="ncgl2827"
atggacaacgacggcggagacatgcgaatcgacgacctacgcagcttcatttcagtcgcccaatcaggccacctgaccgaaaccgccgaaagattaggcatcccgcagcccacactttccagacgaatcagccgagtggaaaaacacgcaggcaccacacttttcgaccgcgccggccgcaaactcgtcctcaaccaacgaggccacgccttcctcaaccacgccagcgccatcgtcgcagaattcaactccgccgcaactgaaatcaaacgcctcatggacccagaaaaaggcacaatccgactggacttcatgcattccttgggcacttggatggtccccgaacttatccgaacattccgcgccgaacaccccaacgtagaattccaactccaccaagcggcagcaatgctcctggtagatcgtgttttggctgatgaaactgacctcgcattagttggccccaaacctgccgaggttggtacctctttagggtgggcgccactgcttcgtcaacgacttgccctagctgttcccgcagatcaccggcttgcctcattttctggccaaggagaattgccgttgattagtgcgacggaagaacctttcgtggcgatgcgagcaggtttcggcacccgactcctcatggatgcattagccgaagaagccggttttgttcccaatgtggttttcgaatccatggaactcaccaccgtcgcaggccttgttagtgcaggtctcggcgttggggtggttccgatggatgatccgtaccttcccacagtgggaatcgtgcaacgtccacttagtccacccgcttatagggaactgggtttggtgtggcgactcaacgcggggccggcacctgcggtggataacttccggaagttcgtggcgggatcgaggtatgcattggaagagggttga

SEQ ID NO: 138 - DNA, 474 bp, Corynebacterium glutamicum
  source: /note="ncgl2886"
atgctggcaggcatgcctaatttaaacgctgaggagctagcagtccgcgtgcgacccgcgctgacaaaactctacgttctctatttccgccgctctgtgaattctgatctctcgggtccacagctcactattttgagtcgcctggaagaaaacggcccatcccgaattagtcgcatcgcggaacttgaagatattcgtatgccaaccgcttcgaatgctctgcatcagctggagcaactcaacctggttgagcgtatccgcgacaccaaagaccgccgaggcgtgcaggttcagctcactgatcatggacgcgaagagcttgagcgcgtgaacaatgaacgaaacgcagagatggctcgactccttgaaatgctcaccccagagcagctggagcgtaccgaagacctggtggatatcattactgagcttgcagaggtgtacggtagctggaaagagaccgacagcggttcttaa

SEQ ID NO: 139 - DNA, 816 bp, Corynebacterium glutamicum
  source: /note="ncgl2898"
gtgattatgcctgaaggacacgtgattcatcgactagctggggaactcaccaagaattttggcgataccattttggacgccacttcacctcaaggacgctttgcttctgaagcggcgatcatcaacggtcaccgcatcgcggttgcggaggcttacggcaagcacctgttcgtcgagttcgatgcggatcaccctgagcacattttgtatatccatttgggtctaattggcacgttgcagtttgaacctgcggaagaaacccgcgggcagattcgcctgcacctttccgacggggagatcgcagctaatttgcgcggaccccaatggtgcaggttgatcaccgatgcagagcacacccaggccattggaaaattgggcgctgatccgattcgcgatgatgccgatccggaaccaattcggattaaggtgcagcgctcagggcgaagcattggttcgttgttgatggatcagaagcttttcgcaggtgtgggaaatatctaccgtgcggagacacttttccgactggggatttcaccgttcaccattggaaaagacatcaccacggcacagttccgatccatttgggcggatcttgttgggttgatgaaagacggtgttgtggctggtcggattgatactgtgcgcccggaacacacaccggaggcgatgggtaggccaccgcggaaagatgatcacggcggtgaggtttacacctatcggcgaaccggtcaagagtgctttctgtgcgcaactcccatcaaggagcaggtcatggagggtcgcaacttattttggtgtcccggctgccaacgctag

SEQ ID NO: 140 - DNA, 464 bp, Corynebacterium glutamicum
  source: /note="ncgl2901"
atgcatcatctacgctatgactcaccaatcggagagctactcctggtcgcaagtgatcaagggctgacctacgtggcattctccgatgaaaactatgcagcttgtaccgtcggatcgacccctggcaccaacgcagtgttggagcaagcagtttctgagctgaaagaatacttcgctggtaaacgcaaagagttcagcactcccctggattggccgagccaaaacttgctgagcttccgagggaaagttcaggagttcttgctgtccattccttatggggagagcaaaacttacaagcagatcgccgctgaactcaacaatgctggtgcggttcgcgcagtgggcagcgcgtgcgcgaccaatccactgccaattttcgctccctgccacagagtgttgcgcactgatggagctttaggcggataccgaggtggcttggaagcgaaacagtggttgttgaagct

SEQ ID NO: 141 - DNA, 1485 bp, Corynebacterium glutamicum
  source: /note="ncgl2905"
atgggatcaattccaacaatgtccatccctttcgatgactcacgtggaccttatgtccttgcgatggatattggctccactgcatcacgaggtggactttatgatgcttccggctgcccaatcaaaggcaccaagcagcgcgaatcccatgaattcaccaccggtgagggcgtttccaccattgatgctgaccaggtggtttcagagatcacctcagttattaatggcgttttgaacgcggctgatcatcacaacatcaaagatcagatcgccgctgtggcgcttgattcttttgcatcctcactaatcctggttgatggtgaaggcaatgcactcaccccatgcatcacctacgcggattctcgttctgcgcaatacgtggagcagctgcgcgcagacatcgatgaggaggcctaccacggccgcaccggcgtccgcctgcacacctcctaccatccatcgcgtctgctgtggctgaaaactgagttcgaggaagaattcaacaaagccaagtacgtgatgaccatcggtgagtacgtctacttcaaacttgcaggcctcaccggaatggctacttcgattgccgcgtggagtggcattttggacgcccataccggcgaacttgatctgactatcttggagcacatcggtgttgatccggctctgttcggtgagatcagaaaccctgatgaaccagccaccgatgccaaagttgtcgacaaaaagtggaagcacctggaagaaatcccttggttccatgccattccagacggctggccttccaacattggcccaggcgccgtggattctaaaaccgtcgcagtcgccgtcgctacatccggcgccatgcgcgtgatccttccgagcgttcccgaacagatcccctctggcctgtggtgttaccgcgtttcccgcgaccagtgcatcgttggtggcgcactcaacgacgtcggacgcgccgtcacctggctggaacgcaccatcatcaagcctgaaaacctcgacgaagtgctgatctgcgaacccctcgaaggcaccccagctgtcctgccgttcttctccggggaacgctccatcggctgggcagcctcagcgcaggccacgatcaccaacattcaggaacaaaccggccctgaacacttgtggcgcggcgttttcgaagccctcgcactctcctaccagcgcgtttgggaacacatggagaaagccggcgcagcccctgaacgggtcatcgcatcaggacgagtctccaccgaccacccagaattcctcgcgatgctttccgatgccctcgacaccccagtcattcctctggaaatgaagcgcgccaccctccgcggcaccgcactcatcgtccttgagcagctcgaaccaggcggcacgcgcgcgacgccaccattcggcacgacgcatcagccgcgctttgcgcactattactccaaggcaagagagcttttcgacgccctctacctcaagttggtctag

SEQ ID NO: 142 - DNA, 777 bp, Corynebacterium glutamicum
  source: /note="ncgl2921"
atggataacgtcgcccccacccaggggttacccccgaaagaatttctaagctctgtcgacattgcattgcagctcattttgctgctccgtgactctggaagtttgaccatttccggtgccgccgaaacccttggagtgggcgcgtctaccattcatcgatccatgtcaatgctggtctaccggggttttgcagtcagaagtgagtcccgcacctaccttccaggctctgcattggcgacctccgcgctgcagccaggccttggcgctgacttgacgaaaaaatgcagccactacatggaatcaatcggcaaggaaactggcgaaacaacccacttggtgattctgcagggagatagcgttcactttattcacagtgttgaaggttccctgccggtgcgcgtgggcaatcgccgaggtcaagtcatgcccgccatccaaaattcaggtggattagtgatgcttgcagagatgtcagcccgggagcttcgggcactgtattccagcctgggcgatgaggaatttgagaatttaagaaagcgtcttcgcaggacccgggatcgaggccatggcgcaaactttggcttctttgagcaggacgttagtgcagttgcggagcctttactcaacgatgtgggtgatgttttaggtgcaattacagtggctgtgccgtcgaatcggttccgggaggtctatccgaaggcggtgcaggttttggaacgacatatgcgggatctgaacaaggctttagctgattaccgagtgcccgaaaaagggtga

SEQ ID NO: 143 - DNA, 1047 bp, Corynebacterium glutamicum
  source: /note="ncgl2929"
atgacttctccagcaacactgaaagttctcaacgcctacttggataaccccactccaaccctggaggaggcaattgaggtgttcaccccgctgaccgtgggtgaatacgatgacgtgcacatcgcagcgctgcttgcgaccatccgtactcgcggtgagcagttcgctgatattgccggcgctgccaaggcattcctcgcggcggctcgtccgttcccgattactggcgcaggtttgctagattccgctggcactggtggcgacggtgccaacaccatcaacatcaccaccggcgcttccctgatcgcagcatccggtggagtgaagctggctaagcacggcaaccgttcagtgagctccaagtccggttccgccgatgtgctggaggcgctgaatattcctttgggccttgatgtggatcgtgctgtgaagtggttcgaagcgtccaacttcaccttcctgttcgcacctgcgtacaaccctgcgattgcgcatgtgcagccggttcgccaggcgctgaaattccccaccatcttcaacacgcttggaccattgctgtccccggcgcgcccggagcgtcagatcatgggcgtggccaatgccaatcatggacagctcatcgccgaggtcttccgcgagctgggccgtacacgcgcgcttgttgtgcatggcgcaggcaccgatgagatcgcagtccacggcaccaccttggtgtgggagcttaaagaagacggcaccatcgagcattacaccatcgagcctgaggaccttggccttggccgctacacccttgaggatctcgtgggtggcctcggcactgagaacgccgaagctatgcgcgctactttcgcgggcaccggccctgatgcacaccgtgatgcgttggctgcgtccgcaggtgcgatgttctatctcaacggcgatgtcgactccttgaaggatggtgcacaaaaggcgctttccttgcttgccgacggcaccacccaggcatggttggccaagcacgaagagatcgattactcagaaaaggagtcttccaatgactag

SEQ ID NO: 144 - DNA, 1425 bp, Corynebacterium glutamicum
  source: /note="ncgl2930"
atgactagtaataatctgcccacggtgttggaaagcatcgtggagggtcgtcgcggacacctggaggaaattcgcgctcgcatcgctcacgtggatgtggatgcgcttccaaaatccacccgctctctgttcgattccctcaaccagggtaggggaggggcgcgtttcatcatggagtgcaagtccgcatcgccttctttgggaatgattcgtgagcactaccagccgggtgaaatcgctcgcgtgtactctcgctacgccagcggcatttccgtgctgtgcgagccggatcgttttggtggcgattacgatcacctcgctaccgttgccgctacctctcatcttccggtgctgtgcaaagacttcatcattgatcctgtccaggtacacgcggcgcgttactttggtgctgatgccatcctgctcatgctctctgtgcttgatgatgaagagtacgcagcactcgctgccgaggctgcgcgttttgatctggatatcctcaccgaggttattgatgaggaggaagtcgcccgcgccatcaagctgggtgcgaagatctttggcgtcaaccaccgcaacctgcatgatctgtccattgatttggatcgttcacgtcgcctgtccaagctcattccagcagatgccgtgctcgtgtctgagtctggcgtgcgcgataccgaaaccgtccgccagctaggtgggcactccaatgcattcctcgttggctcccagctgaccagccaggaaaacgtcgatctggcagcccgcgaattggtctacggccccaacaaagtctgcggactcacctcaccaagtgcagcacaaaccgctcgcgcagcgggtgcggtctacggcgggctcatcttcgaagaggcatcgccacgtaatgtttcacgtgaaacatcgcaaaaaatcatcgccgcagagcccaacctgcgctacgtcgcggtcagccgtcgcacctccgggtacaaggatttgcttgtcgacggcatcttcgccgtacaaatccacgccccactgcagggcagcgtcgaagcagaaaaggcattgatcgccgccgttcgtgaagaggttggaccgcaggtccaggtctggcgcgcgatctcgatgtccagccccttgggggctgaagtggcagctgcggtggagggtgacgtcgataagctaattcttgatgcccatgaaggtggcagcggggaagtattcgactgggctacggtgccggccgctgtgaaggcaaagtctttgctcgcgggaggcatctctccggacaacgctgcgcaggcactcgctgtgggctgcgcaggtttagacatcaactctggcgtggaataccccgccggtgcaggcacgtgggctggggcgaaagatgccggcgcgctgctgaaaattttcgcgaccatctccacattccattactaa

SEQ ID NO: 145 - DNA, 1254 bp, Corynebacterium glutamicum
  source: /note="ncgl2931"
atgactgaaaaagaaaacttgggcggctccacgctgctacctgcatacttcggtgaattcggcggccagttcgtcgcggaatccctcctgcctgctctcgaccagctggagaaggccttcgttgacgcgaccaacagcccagagttccgcgaagaactcggcggctacctccgcgattatctcggccgcccaaccccgctgaccgaatgctccaacctgccactcgcaggcgaaggcaaaggctttgcgcggatcttcctcaagcgcgaagacctcgtccacggcggtgcacacaaaactaaccaggtgatcggccaggtgctgcttgccaagcgcatgggcaaaacccgcatcatcgcagagaccggcgcaggccagcacggcaccgccaccgctctcgcatgtgcgctcatgggcctcgagtgcgttgtctacatgggcgccaaggacgttgcccgccagcagcccaacgtctaccgcatgcagctgcacggcgcgaaggtcatccccgtggaatctggttccggcaccctgaaggacgccgtgaatgaagcgctgcgcgattggaccgcaaccttccacgagtcccactaccttctcggcaccgccgccggcccgcacccattcccaaccatcgtgcgtgaattccacaaggtgatctctgaggaagccaaggcacagatgctagagcgcaccggcaagcttcccgacgttgtggtcgcctgtgtcggtggtggctccaacgccatcggcatgttcgcagacttcattgacgatgaaggcgtagagctcgtcggcgctgagccagccggtgaaggcctcgactccggcaagcacggcgcaaccatcaccaacggtcagatcggcatcctgcacggcacccgttcctacctgatgcgcaactccgacggccaagtggaagagtcctactccatctccgccggacttgattacccaggcgtcggcccacagcacgcacacctgcacgccaccggccgcgccacctacgttggtatcaccgacgccgaagccctccaagcattccagtacctcgcccgctacgaaggcatcatccccgcactggaatcctcacacgcgttcgcctacgcactcaagcgcgccaagaccgccgaagaggaaggccagaacttaaccatcctcgtctccctatccggccgtggcgacaaggacgttgaccacgtgcgccgcaccctcgaagaaaatccagaactgatcctgaaggacaaccgatga

SEQ ID NO: 146 - DNA, 3345 bp, Corynebacterium glutamicum
  source: /note="ncgl2982"
atgaatggtcaacaagtgagttcttcgctttcgaataattcggagcagtccggcctgcgtggcaggatcgttgctccagcaccgccggcgcctgtgcccgaggcgcgcaagaaggctgtcgcacgcacggatggtgatcgctcgagtttgaaaaactcgcctacggcatccgccacccaggcagcccagacgcgtctggcagaaccggaaccaaaaaagcacacctccgattctgatgtggtgcgctcgactggctccatggcaatagccacgctgctgagtcgtatcaccggtttcctgcgcaccgtgatgattggtgcggcgctgtcgccggctatcgcgtcggcgttcaacactgccaacacgctgcccaacctgatcactgagatcgtgttgggtgcggtgctgacatcgctggttattccggtgcttacccgcgcggaaaaagaagacgccgacggcggttccgggttcttcaggcggctgctcaccctgtcggtgacgctgctgggcggtgtcaccatcctgtcgattatcggcgcgccgctgctgacacggatgatgctgtcctctgagggacaagtcaacgtggtcatgtccacggcctttgcgtattggctgctgccacagattttcttctacggcctgtttgccctgttcatggctgtgttgaacacccgtgaagtgttcaaacccggcgcgtgggcacctgttgtcaacaatgtgatcaccttgaccgtgctgggcgtgtacatggtgctgcctgcgcgtttgcacccgcatgagcaggtgggcatttttgatccgcagatcattttcctcggcgtgggcaccacccttggtgtggttgcacagtgtctaatcatgattccgtacctgcgtcgcgcgggcattgatatgcgccctctgtggggtatcgatgcgcgtttgaagcagttcggtggcatggccatggcgatcatcgtgtacgtggcgatctcccagttcggttacatcatcaccactcgcattgcgtcgattgcagacgatgctgcgccgtttatttatcagcagcactggatgttgctgcaagttccttatggcatcattggcgtcaccttgctcaccgcgattatgccgcgactgtcccgcaacgcggcagacggcgacgatagggcagtagtctctgaccttcagttgggttccaagctgaccttcatcgcactgatccccatcgtggtgttcttcaccgccttcggtgtccctattgccaatggcctttttgcctacggccaattcgatgccaacgccgccaacatccttggttggactctgagcttctctgctttcacgctgattccttacgctttggtgctgctacatctgcgtgtgttttatgcgcgtgaagaggtctggaccccaaccttcatcatcgccggcatcaccgccaccaaggtcgtgctgtccctgttggcaccgctgctgtcgagctccccggagcgtgtggtggtgcttcttggtgcggccaacggtttcagtttcatcaccggcgcggtcatcggcgcgtatctgttgcgcaagaaactcggcctgttgggtatgcgctctttggctaaaacctccctgtgggcgttgggctctgcggcggttggtgcagcagcagcatgggcgttggggtggctgattcaagccgtcgtgggcgatttcttgctgggcactctaagctccgtaggctacttgttgtacctggctgtgttgggtgtcttcttcatcatcatcaccggcatcgtgctgtcacgttctggtctgccagaggtccaaaacttaggccaggcactgacccgcatcccgggtatgagtcgctttattcgcccgaacaccaagatctctttggatgtcggcgaagtctcccagcaagatttctccacccagctggtcgcgccaagcgagttctccgcaacccctgttccgccaccaatgtccgccggtattgtccgcggacctcgcctggttcccggcgccccagtcggcgacggtcgcttccgcttgcttgccgatcacggcggcgtccagggtgcacgtttctggcaggcccgcgagatcgccaccggcaaggaagtcgcgctgatcttcgtggatacttccggcaacgccccatttgcgccactgtcttcggcagccgcagcgggcatcgcctacgaggtgcagcgccgcaccaagaagctggccagcttgggcagcttggcggtggcccccaatatctactccgaggcgtaccgcaacggttgcctcattgtggccgattgggtgcctggctccagcttgagcgccgtcgcggaatccggtgccgatccccgcgccgccgcgttcgcgctcgcggaactaactgaaaccatcggcgaggcccacgagatgggtatcccggccggcttggacaacaagtgccgcatccgcatcaacaccgacggccatgccgtcctcgccttcccggcgattttgcccgatgcctcagagctccgcgacgccaagtccctggcctcggccgccgagatgcttatcgacgcgaccctcgctcccagcgacgtcaaggcaatggtcactgaagcccaggggctagctacagaagacaatcccgattacgcatcacttgccatggcgatgcgcacctgcggactgttcaccgaggaaccaacccaccttgtggtgaagaaggaaaagacaccaaagcctgcgacacgtgatggtttcggtgcctccgactacaccgtcaagggcatggcagccatcgccgctgtggtgatcatcttggtttccctggtggctgccggtaccgcgttcctcaccagcttcttcggcagcagcaccaacgaacaatccccattggcttctgttgaagccaccacttctgcaacaccagaacctgtggggccaccggtctacctggatctggatcaagcccgcacgtgggatgacggtgcaggaacagatgtcaccgacgtcaccgacggcaacacctccaccgcatggacctccaccggcggcgacggcctcctagttgacctgtccacgcctgcccgcctcgaccgcgtcatcttgaccaccggcaccggctctgacagcaacgtgacctcgaccgtgaagatctacgcattcaacgacgcctcaccacactccctgtcggaaggcatcgagatcggcaccgtggattattccggccgcagcctcagccacagcatccgcgattcctccaagcttccgggtcaggtggaatccatggtgattctggtcgatgaggttcattcctcacaaacctcagacaccaatccacagatgcagatcgctgaagtacaactcgttggttggtaa

SEQ ID NO: 147 - DNA, 954 bp, Corynebacterium glutamicum
  source: /note="ncgl2984"
atgtctgaagaacaatctgccgtagcaccaaagattcatgatgtcgccatcatcggctccggtccagctggctataccgcagcagtatatgcagcccgcgctgacctcaaccccatcatgttcgagggctatgaatacggtggatctttgatgaccactactgacgtggaaaacttcccaggctttgaaaagggaatcctgggcccagagctcatggaaaacatgcgcgctcaggccgagcgtttcggcaccgacatgcacatggagcttgtcgaccgcgttgatctcaccggcgacatcaagaagctgtgggtcggcgacgacgagtaccacgcgcgtgctgtcatcttgtccatgggttctgcacctcgctacttgggtgtgaagggcgagcaggaactgctcggccgtggcgtttctgcatgtgcaacctgcgatggtttcttcttccgcgatcaggatatcgccgtgatcggtggtggcgactccgcgatggaggaagcaaccttcctcaccaagttcgctcgcagtgtcaccatcgtgcaccgccgcgaagagttccgcgccagcgccatcatgctggagcgtgctcagaagaacgagaagattcgcttcgtcaccaacaagactgtcgaagaggtcattgaggcagatggcaaggtcagcggcctgaagctcaatgacaccgtgactggtgaagattccgtcttggatgtcaccgccatgttcgttgccatcggccatgatccacgctctgaaatcctcgcaggtcaggtcgaggttgatccttccaactacgttttggttcaggagccttccacccgcaccaaccttgacggtgttttcgctgctggcgacctggtggacagccactaccagcaggccatcaccgcagctggttccggttgccgcgcagctatcgatgcagagcattacctagcttctctggcctaa

SEQ ID NO: 148 - protein, 357 aa, Corynebacterium glutamicum
  source: /note="ncgl0009"
MFMLAQRTLPIHITAPHLPVARVFHQIRATDADRTSLQRDLELSQAGITRHVSALIDAGLVEETRVDSGARSGRPRTKLGIDGRHLTAWGVHIGLRSTDFAVCDLAGRVIRYERVDHEVSHSTPSETLNFVAHRLQTLSAGLPEPRNVGVALSAHLSANGTVTSEDYGWSEVEIGIHLPFPATIGSGVAAMAGSEIINAPLTQSTQSTLYFYAREMVSHAWIFNGAVHRPNSGRTPTAFGNTNTLKDAFRRGLTPTTFSDLVQLSHTNPLARQILNERAHKLADAVTTAVDVVDPEAVVFAGEAFTLDPETLRIVVTQLRANTGSQLRIQRADAHILRTAAIQVALHPIRQDPLAFV

SEQ ID NO: 149 - protein, 123 aa, Corynebacterium glutamicum
  source: /note="ncgl0019"
MSIEPGIPTLGPLEEQVMHILWDHGKLTVREVIEFLPGDPAYTTIATVLRHLGRKGMVTIVKDGRTARHSALMNREEYTAGVMDQVLSTSRDRTASILHFVDTITATDRELLLEYLQQQEGRK

SEQ ID NO: 150 - protein, 197 aa, Corynebacterium glutamicum
  source: /note="ncgl0054"
MTSAQPITSVDAQTLKSWIDKHEGLTVIDVRTAHEFSNLHIKGSYNVPLTSLAEHSEEIASRVGEHVVLVCQSGIRAGQAQQKLAPLGISTVAVLEGGINSFAKADGDVVRGTQVWDIERQVRFAAGSLVFAGLVGGKFLSPKVRTLSGIIGAGLTFSGVSNTCAMGKALSALPWNKTKPVPTETETLSKLPSPKEN

SEQ ID NO: 151 - protein, 171 aa, Corynebacterium glutamicum
  source: /note="ncgl0082"
MTQDEHPRQADSHFNMLLPDGNENAHQLSVALNQVAHLLAYDADSSIHRPDGLSLASYRILFSLWTDGPMSPLQVADKTGMKKSAISNLLKPLLAESLIVQVTAENDRRSKVLSLSEKGTTYIQKTATRQNALESEWFGTLTDIEQDLLESLLRKLLDSNRASKVRKNRSN

SEQ ID NO: 152 - protein, 133 aa, Corynebacterium glutamicum
  source: /note="ncgl0142"
MDLNALFEIFTLVVFQVGVTWHAVLSKREGFRQAFAQFDVAKVAAFNEDDVERLLDDLQIFRNRRKINAAITNAKALLELNDETGTFDSIIADHSTDATVMVKQLKALGFTHIGLTSLSILQQAIGVTEPKAA

SEQ ID NO: 153 - protein, 340 aa, Corynebacterium glutamicum
  source: /note="ncgl0223"
MTTKDISRPVCILGLGLIGGSLLRDLHAANHSVFGYNRSRSGAKSAVDEGFDVSADLEATLQRAAAEDALIVLAVPMTAIDSLLDAIHTHAPNNGFTDVVSVKTAVYDAVKARNMQHRYVGSHPMAGTANSGWSASMDGLFKRAVWVVTFDQLFDGTDINSTWISIWKDVVQMALAVGAEVVPSRVGPHDAAAARVSHLTHILAETLAIVGDNGGALSLSLAAGSYRDSTRVAGTDPGLVRAMCESNAGPLVKALDEALAILHEAREGLTAEQPNIEQLADNGYRSRIRYEARSGQRRAKESVSPTITSSRPVLRLHPGTPNWEKQLIHAETLGARIEVF

SEQ ID NO: 154 - protein, 218 aa, Corynebacterium glutamicum
  source: /note="ncgl0241"
MFEGPLQDLIDELSRLPGVGPKSAQRIAFHLLNVDPTDITRLQEALGGVRDGVQFCRICCNISREEVCRICSDSGRDGGTICVVEEPKDIQVIERTGEFSGRYHVLGGALDPLANIGPRELNISTLLQRIGGVLPDRELADSTPENKLFDATPTVREVILATDPNTEGEATASYLGRLLKDFPDLVISRLASGMPLGGDLEFVDELTLSRALSGRLQI

SEQ ID NO: 155 - protein, 250 aa, Corynebacterium glutamicum
  source: /note="ncgl0242"
MTTLNIGLILPDVLGTYGDDGNALVLRQRARMRGINAEIQRVTLDDAVPSNLDLYCLGGGEDTAQILATEHLTKDGGLQTAAAAGRPIFAVCAGLQVLGDSFRAAGRVIDGLGLIDATTVSLQKRAIGEVETTPTRAGFTAELTERLTGFENHMGATLLGPDAEPLGRVVRGEGNTDVWAASENTDDQRQQFAEGAVQGSIIATYMHGPALARNPQLADLMLAKAMGVALKDLEPLDIDVIDRLRAERLA

SEQ ID NO: 156 - protein, 1001 aa, Corynebacterium glutamicum
  source: /note="ncgl0304"
MADTAGTTGSKKKYLVIVESATKAKKIQPYLGNDYIVEASVGHIRDLPRGAADIPAKYKKEPWARLGVDTDRGFAPLYVVSPDKKKKVADLKAKLKLVDELLLATDPDREGEAIAWHLLEVLKPTVPVRRMVFNEITKPAILAAAENTRELDENLVDAQETRRILDRLYGYEVSPVLWKKVMPRLSAGRVQSVATRVIVERERERMAFVSADYWDLSAEFNAGENGKADSDNPSSFTARLSTIDGNRVAQGRDFNDRGELTSEAVVVDKQRAEALAEALEGQEMAVVGVEEKPYTRRPYAPFMTSTLQQESGRKLHYTSERTMRIAQRLYENGHITYMRTDSTSLSEQGMKAARDQALELYGAEYVSPSPRTYDRKVKNSQEAHEAIRPAGEAFATPGQLHGQLDAEEFKLYELIWQRTVASQMADAKGTSMKVTIGGTAKTGEKTEFNATGRTLTFPGFLRAYVETTRTADGRDVADNAEKRLPLLSEGDLLKVLGIEADGHSTNPPARYTEASLVKKMEDLGIGRPSTYASIIKTIQDRGYVYSRGNALVPSWVAFAVVGLLEANFTSLVDYDFTSSMEDELDNIAAGREGRTEWLNGFYFGDAEADQSMAESVARQGGLKALVDANLEHIDARSVNSLKLFDDAEGRAVNVRVGRYGPYIERIVGTTAKGEPEFQRANLPEETTPDELTLEVAEKLFATPQGGRELGINPANGRMVVAKEGRFGPYVIEQVTDSERAGAEAQAEEVVAAERKAEDEQRAADGMRPKNWETKTAANQKEKRINQLVEENLKPATASLFSGMEPATVTLEEALKLLSLPREVGVDPSDNEVITAQNGRYGPYLKKGSDSRSLNSEEQIFTVTLDEARRIYAEPKRRGRAAAQPPLKQLGDNDVSGKPMTVKDGRFGPYVTDGTTNASLRKGDVPESLTDARANELLSERRAKEAADGGAPAKKTSTKKTAAKKTTAKKTTAKKTTAKKTVRKAPPKTTKNVVKAGAKKKS

SEQ ID NO: 157 - protein, 486 aa, Corynebacterium glutamicum
  source: /note="ncgl0306"
MLGTNVFGALAVMLFVRFLIPQPDASNFNAEISYLPAVGFAYLAFAIVAGMLVTFLMFRPVLDWQRSPEDHDRNMVRNLVMRIPIYQAILCAVVWLIGIAIATLISASVSTSLALVVAFSTLMAAAIVVLLTYLEAERLVRPVAASALARRFEDSTLEPPVSQRLRMTWLLTLGIPVMGILLLIWGYSQGIFGSDASGIMPAIAALAFASLVTGYLGNRLVVSSVVDPIRELQEAINRVRRGENDVQVDIYDGSEIGVLQAGFNEMMRGLRERQRVRDLFGRYVGAEVAKRALEERPTLGGEDRKVAVLFVDVIGSTTFAVNHTPEEVVEALNDFFEHVVEVVHRNKGVINKFQGDAALAIFGAPLPLSDATGHALAAARELRAELKDLQLKAGIGVAAGHVVAGHIGGHARFEYTVIGDAVNQAARLTEIAKTTPGRTVTNASTLREANEAEQARWTLMKSVELRGRGQMTQIARPIRPTLADRS

SEQ ID NO: 158 - protein, 292 aa, Corynebacterium glutamicum
  source: /note="ncgl0356"
MVPAAGMGTRFLPATKTIPKELLPVVDTPGIELVAKEAADLGATRLAIITAPNKDEILKHFEEFPELEATLEARGKIDQLNKVRAARELIATVPVVQEKPLGLGHAVGLAEAVLDEDEDVVAVMLPDDLVLPFGVTERMAEVRAKFGGSVLAAIEVAEDEVSNYGVFELGELDAESESEGIRRVVGMVEKPAPEDAPSRFAATGRYLLDRAIFDALRRIEPGAGGELQLTDAIALLIEEGHPVHIVVHEGKRHDLGNPAGYIPAVVYFGLRHAEYGSKIHRAVKEVLAEFES

SEQ ID NO: 159 - protein, 273 aa, Corynebacterium glutamicum
  source: /note="ncgl0398"
MGTMTTIAVIGGGQIGEALVSGLIAANMNPQNIRVTNRSEERGQELRDRYGILNMTDNSQAADEADVVFLCVKPKFIVEVLSEITGTLDNNSAQSVVVSMAAGISIAAMEESASAGLPVVRVMPNTPMLVGKGMSTVTKGRYVDAEQLEQVKDLLSTVGDVLEVAESDIDAVTAMSGSSPAYLFLVTEALIEAGVNLGLPRATAKKLAVASFEGAATMMKETGKEPSELRAGVSSPAGTTVAAIRELEESGIRGAFYRAAQACADRSEELGKR

SEQ ID NO: 160 - protein, 145 aa, Corynebacterium glutamicum
  source: /note="ncgl0408"
MPGKILLLNGPNLNMLGKREPDIYGHDTLEDVVALATAEAAKHGLEVEALQSNHEGELIDALHNARGTHIGCVINPGGLTHTSVALLDAVKASELPTVEVHISNPHAREEFRHHSYISLAAVSVIAGAGIQGYRFAVDILANLQK

SEQ ID NO: 161 - protein, 207 aa, Corynebacterium glutamicum
  source: /note="ncgl0424"
MRLTKLAATIGCVTLSGLALVACSSDSTAGTDAVAVGGTFQFHSPDGKMEIFYDEADRQQLPDIGGDSLMEEGTQINLSDFENQVVILNAWGQWCAPCRSESDDLQIIHEELQAAGNGDTPGGTVLGINVRDYSRDIAQDFVTDNGLDYPSIYDPPFMTAASLGGVPASVIPTTIVLDKQHRPAAVFLREVTSKDVLDVALPLVDEA

SEQ ID NO: 162 - protein, 268 aa, Corynebacterium glutamicum
  source: /note="ncgl0425"
MSEIVVAQSIGQQFADVAASGPLFLGILAAALAGLVSFASPCVVPLVPGYISYLAGVVGGEVEYSAQGTKVKTKRFAVGGAAILFILGFTVVFVLATVSVFGAISVLTLNADTLMRIGGVVTIIMGIVFMGFIPGLQRDTRMAPKRWTTWLGAPLLGGVFALGWTPCLGPTLAAIISISAGTEGMTAARGVILIVGYCLGLGLPFLLIALGSSKALTGVEWLRKHSRTLQIIGGVFLILVGVALLSGSWAIFINWVRQWTVEYGATLL

SEQ ID NO: 163 - protein, 337 aa, Corynebacterium glutamicum
  source: /note="ncgl0427"
MLPVNQTYAQFSDTAFVSAYIIYVLALILSLVYYVKQQGIIDARREQTRVRELVGAGGSADSVADLPDDIADGVLADEDLAKREETARKLANMTQSLMWLGVMVHLVSVVMRGLSASRFPFGNLYEYILMVTLFAIIGAVLILQRPQFRVVWPWILTPMLALLFYGGTQLYSDAAPVVPALQSFWFPIHVSSVSIGASIGIVSGIASLLYLLRMWQPKGKEKGFFGAVAKPLPSGKTLDNLAYKTAIWTVPIFGLGVILGAIWAEAAWGRFWGWDPKETVSFITWVLYAGYLHARATAGWRNTNAAWINILALVTMIFNLFFINMVVSGLHSYAGLN

SEQ ID NO: 164 - protein, 294 aa, Corynebacterium glutamicum
  source: /note="ncgl0439"
MLFTLEQLRCFVAVANHLHFGKAAAELSMTQPPLSRQIQKLEKIVGATLLDRDNRKVELTTAGFAFLKDARLILNSTEKAAERARLASSGMWGQLNIGYTAAAGFSILGPTLNQLHEKMPGVSVDLFEMVSTEQIAALESGLLDLGIGRLSSPVEGLQTRRLQADSLVLAAPKGHPLLDQDRPLLRKHLTGVPFLQHSPTKAKYLYDIVVRNFTINDAQVQHTLSQITTMVSLVASGLGVALVPESAKKLNYSGVEYRHFYDLPVGLAELQAIYSTSNDNPAVRKFIKNIDDTF

SEQ ID NO: 165 - protein, 323 aa, Corynebacterium glutamicum
  source: /note="ncgl0458"
MSDENNNEFELDEDLNFSASFSDEFADDDFDEEADVDADADAAAEATALEAEQDLEDETLNAPEVADEVAEEAPAAEEAEAPAEEDEEADSLAQAAAALGDTDEQDADAEYKARLRKFTRELKKQPGVWYIIQCYSGYENKVKANLDMRAQTLEVEDDIFEVVVPIEQVTEIRDGKRKLVKRKLLPGYVLVRMDMNDRVWSVVRDTPGVTSFVGNEGNATPVKHRDVAKFLMPQEQAVATGEAAAAAAEGEQVVAMPTDTKKPQVAVDFTVGEAVTILTGAFASVSATISSIDPELQKLEVLVSIFGRETPVDLSFDQVEKVS

SEQ ID NO: 166 - protein, 1159 aa, Corynebacterium glutamicum
  source: /note="ncgl0471"
MAVSRQTKSVVDIPGAPQRYSFAKVSAPIEVPGLLDLQLDSYSWLIGTPEWRARQKEEFGEGARVTSGLENILEELSPIQDYSGNMSLSLSEPRFEDVKNTIDEAKEKDINYAAPLYVTAEFVNNTTGEIKSQTVFIGDFPMMTNKGTFIINGTERVVVSQLVRSPGVYFDQTIDKSTERPLHAVKVIPSRGAWLEFDVDKRDSVGVRIDRKRRQPVTVLLKALGWTTEQITERFGFSEIMMSTLESDGVANTDEALLEIYRKQRPGEQPTRDLAQSLLDNSFFRAKRYDLARVGRYKINRKLGLGGDHDGLMTLTEEDIATTIEYLVRLHAGERVMTSPNGEEIPVETDDIDHFGNRRLRTVGELIQNQVRVGLSRMERVVRERMTTQDAESITPTSLINVRPVSAAIREFFGTSQLSQFMDQNNSLSGLTHKRRLSALGPGGLSRERAGIEVRDVHPSHYGRMCPIETPEGPNIGLIGSLVSYARVNPFGFIETPYRRIIDGKLTDQIDYLTADEEDRFVVAQANTHYDEEGNITDETVTVRLKDGDIAMVGRNAVDYMDVSPRQMVSVGTAMIPFLEHDDANRALMGANMQKQAVPLIRAEAPFVGTGMEQRAAYDAGDLVITPVAGVVENVSADFITIMADDGKRETYLLRKFQRTNQGTSYNQKPLVNLGERVEAGQVIADGPGTFNGEMSLGRNLLVAFMPWEGHNYEDAIILNQNIVEQDILTSIHIEEHEIDARDTKLGAEEITRDIPNVSEEVLKDLDDRGIVRIGADVRDGDILVGKVTPKGETELTPEERLLRAIFGEKAREVRDTSMKVPHGETGKVIGVRHFFREDDDDLAPGVNEMIRIYVAQKRKIQDGDKLAGRHGNKGVVGKILPQEDMPFLPDGTPVDIILNTHGVPRRMNIGQVLETHLGWLASAGWSVDPENPENAELVKTLPADLLEVPAGSLTATPVFDGASNEELAGLLANSRPNRDGDVMVNADGKATLIDGRSGEPYPYPVSIGYMYMLKLHHLVDEKIHARSTGPYSMITQQPLGGKAQFGGQRFGEMEVWAMQAYGAAYTLQELLTIKSDDVVGRVKVYEAIVKGENIPDPGIPESFKVLLKELQSLCLNVEVLSADGTPMELAGDDDDFDQAGASLGINLSRDERSDADTA

SEQ ID NO: 167 - protein, 268 aa, Corynebacterium glutamicum
  source: /note="ncgl0531"
MAGGNREPGRTVTSKVIAVLGAFEHTMRPLGVTEIAELADLPPSTTHRLVSELTEGGLLSKKSDGRYQLGLRIWELAQNTGRQLRDTARPFIQELYSLTSETAQLVVRDKDEALLIDRAYGTKKIPRSARVGGRLPLNSTAVGKILLAFDEPWVKQSYLKLPLNASTPKTIVNPDVLAAQLKQIHSQGFAITHDEQRIGGASIAVPVWHTGKLGAALGLVVPTAQAANLERYLPILQATSQRITKATALIPLDTLLASHKNAERKSDT

SEQ ID NO: 168 - protein, 419 aa, Corynebacterium glutamicum
  source: /note="ncgl0546"
MAEGMLMPTTSAQVSGHKFLVRRIEHGLVMGDVRMIHDPLGRRRRALVFGVVACVMLAVGSLALAIFRPAKDPADAPLIRAESGALFVQLDGAVHPVANVASARLIVGEPVDPVNASDAIIAGMPRGVPVGVSDAPGLFSSTEEPEQDWFVCQDVGTGDLHITVPRDGLGPTLIAEGNGWLGASKSETGEVTWNLITADGRRELPAWDSEHGRIMRRHLGISEDTPRIYLTTELLNAIPEHDAVRFPDPLPELVDASTRNWLRLDGALAEITPLQRGLLIDAGSGVFPDPTALLGVHEETANTLTLPEQTVSWQDLDGGFACADGEGQIGFLETLESGVALSGDSRAKSFSTNAGGAVGVDSGFGYYVVSDFGLMHPVSTGESMVALGITDVQVVPWSVLRLLPQGSELAKETALAPTY

SEQ ID NO: 169 - protein, 165 aa, Corynebacterium glutamicum
  source: /note="ncgl0564"
MKSEFPVSGTRRFEHAADTQNFGEELGRHLEAGDVVILDGPLGAGKTTFTQGIARGLQVKGRVTSPTFVIAREHRSEIGGPDLIHMDAYRLLGEDSEDADPIGALDSLDLDTDLDLAVVVAEWGGGLVEQIADSYLLITIDRETAVQEDPESEARIFHWEWREGR

SEQ ID NO: 170 - protein, 538 aa, Corynebacterium glutamicum
  source: /note="ncgl0573"
MAKLIAFDQDAREGILRGVDALANAVKVTLGPRGRNVVLDKAFGGPLVTNDGVTIARDIDLEDPFENLGAQLVKSVAVKTNDIAGDGTTTATLLAQALIAEGLRNVAAGANPMELNKGIAAAAEKTLEELKARATEVSDTKEIANVATVSSRDEVVGEIVAAAMEKVGKDGVVTVEESQSIETALEVTEGISFDKGYLSPYFINDNDTQQAVLDNPAVLLVRNKISSLPDFLPLLEKVVESNRPLLIIAEDVEGEPLQTLVVNSIRKTIKVVAVKSPYFGDRRKAFMDDLAIVTKATVVDPEVGINLNEAGEEVFGTARRITVSKDETIIVDGAGSAEDVEARRGQIRREIANTDSTWDREKAEERLAKLSGGIAVIRVGAATETEVNDRKLRVEDAINAARAAAQEGVIAGGGSALVQIAETLKAYAEEFEGDQKVGVRALATALGKPAYWIASNAGLDGSVVVARTAALPNGEGFNAATLEYGNLINDGVIDPVKVTHSAVVNATSVARMVLTTEASVVEKPAEEAADAHAGHHHH

SEQ ID NO: 171 - protein, 506 aa, Corynebacterium glutamicum
  source: /note="ncgl0578"
MTTQSRVSTGGDNPNKVALVGLTFDDVLLLPDASDVVPSEVDTSTQLTRNIRLNTPILSAAMDTVTEARMAIGMARHGGIGVLHRNLSIQEQAENVELVKRSESGMVTDPVTCTPDMSIQEVDDLCARFRISGLPVVDEAGKLVGICTNRDMRFESDMNRRVAEVMTPMPLVVAEEGVTKEQALALLSANKVEKLPIIAKDGKLVGLITVKDFVKTEQHPNASKDASGRLLVAAGIGTGEESFQRAGALADAGVDILVVDSAHAHSRGVLDMVSRVKKSFPKVDIVGGNLATREAAQAMIEAGADAIKVGIGPGSICTTRVVAGVGAPQITAIMEAAVPAHKAGVPIIADGGMQFSGDIAKALAAGANSVMLGSMLAGTAEAPGETITINGKQYKRYRGMGSMGAMQGRGLSGEKRSYSKDRYFQSDVKSEDKLVPEGIEGRVPFRGPIGDIIHQQVGGLRAAMGYTGSSTIEELHNARFVQITSAGLKESHPHHIQQTVEAPNYH

SEQ ID NO: 172 - protein, 303 aa, Corynebacterium glutamicum
  source: /note="ncgl0581"
MLNLNRLHILQEFHRLGTITAVAESMNYSRSAISQQMALLEKEIGVKLFEKSGRNLYFTEQGEVLASETHAIMAAVDHARAAVLDSMSEVSGTLKVTSFQSLLFTLAPKAIARLTEKYPHLQVEISQLEVTAALEELRARRVDVALGEEYPVEVPLVDASIHREVLFEDPMLLVTPESGPYSGLTLPELRDIPIAIDPPDLPAGEWVHRLCRRAGFEPRVTFETSDPMLQAHLVRSGLAVTFSPTLLTPMLEGVHIQPLPGNPTRTLYTAVREGRQRHPAIKAFRRTLAHVAKESYLEARLVE

SEQ ID NO: 173 - protein, 305 aa, Corynebacterium glutamicum
  source: /note="ncgl0598"
MTHQNSPLFLKSALRLYNRASFKASHKVIEEYSTSFSLSTWLLSPRIRNDIRNLYAVVRIADEIVDGTAHAAGCSTAKIEEILDAYEIAVLAAPQQRFNTDLVLQAYGETARRCDFEQEHVIAFFASMRKDLKANTHDPDSFTTYVYGSAEVIGLLCLSVFNQGRTISKKRLEIMQNGARSLGAAFQKINFLRDLAEDQQNLGRFYFPETSQGTLTKEQKEDLIADIRQDLAIAHDAFPEIPVQARIGVISAYLLFQKLTDRIEATPTSDLLQERVRVPLHIKLSILASATMRGLSMSIYRKNSR

SEQ ID NO: 174 - protein, 124 aa, Corynebacterium glutamicum
  source: /note="ncgl0600"
MRHNWPCDTRMDNGMTITTEHSTHPDLDFNDEIYRELNRICASLSQQCSTYPPEFRTCLDAAFQALRGGKLIRPRMLLGLYGARPPDSRHGGFDQEADFRIAGQRFSNTAGARYLHQECRRTML

SEQ ID NO: 175 - protein, 195 aa, Corynebacterium glutamicum
  source: /note="ncgl0601"
MLNMQEPDKIHPAESPLRNIYDVKTSDPKSELVDRSGMSEEDIAQIGRLMKSLASLRDVERSIGEASARYMELSAPDMRALHYLIVAGNAGEVVTPGMLGAHLKLSPASVTKTLNRLEKGGHIVRKVHPVDRRAFALTVTDATRGEAMRTLGKHQARRFDAAKRLTPQEREVVIRFLQDMTQELSLNNAPWLNTE

SEQ ID NO: 176 - protein, 304 aa, Corynebacterium glutamicum
  source: /note="ncgl0641"
MSFHITSVNVNGIRAAVKQRSETNLGFLPWLEETRPDVVLLQEVRASEKDTATALQPALENGWHYIGAPAAAKGRAGVGILSRHELEDVNIGFGSFLDSGRYIEATIKDTTLDVPVTVASLYLPSGSAGTDKQDEKYRFLDEFEGFLDQRAKERSHMVIGGDWNICHRREDLKNWKTNQKKSGFLPDERAFMDSVFGTFPDEATQVAGAGDFFGAVDYEGTRRREATRDPAWFDVARRLQPEGDGPYTWWTYRGKAFDTGAGWRIDYQAATAAMLERAERSWVDKATAYDLRWSDHSPLNVIYT

SEQ ID NO: 177 - protein, 308 aa, Corynebacterium glutamicum
  source: /note="ncgl0663"
MSSHDLVDVVVVGAGAAGLAAAVALGRSLRSVTVIDAGQPRNRYSHAAHNVLGQEGIAPAELLEKGRAEACSYGVTIAPGRVAKVERTGSTFAITLDDASLLHSRRIILAHGAVDDLPEVEGLSDFWGTKVLHCAYCHGFEARDSEIVVVGASPMAAHQALMFSQLSKTVSLVGTIDIDEQTRERLDSAGVKVLGTNAVRVSAEGDGLSVELSEGDHLSCDNIVVASRPLVEGTLYTQLGGQMEENPMGRFIPGTQTGRTPIEGVWAAGNAQAPMAMVYGSAAQGVMAGAEINFDLILEDISLASAQS

SEQ ID NO: 178 - protein, 441 aa, Corynebacterium glutamicum
  source: /note="ncgl0668"
MSKLYAGARINALRRTHQLTQSALADKLDLSTSYLNQLENDGRPLTATVLLQLMKVFDVEASYFSPDRGTATATRLAETLAMNQGPTMSMDDLLDFADRFPQLAQHIIQPAEVDPAHSSAHDFVRDYFATHKNYIDSLDRLGEELATAIGQPGLRVTRLAQLLDAEYNITVRFRAPDITGRRHFDPQSRQILLRQDLSEAQQCFQLAEELTFLAHAELLDTLTTDQPDLPYEAAIRLAKVGLSQYFAAAVVMPYTRFLEFAQDKHYDIELISEAFGVSFESACHRLSTLQRSGASGVPFFFVRSDRAGNISKRQSAATFHFSRTDGTCPLWALHRAFERQGNITRQVARMPDGRTYLWLARAVKGRTHGFGHPAAEFAIGLGCDISEAPGLVYSQGLNLDPESAAEIGPGCRICPRENCVQRAFPPSGQESIRPAPVQLLN

SEQ ID NO: 179 - protein, 424 aa, Corynebacterium glutamicum
  source: /note="ncgl0737"
MSSESPRPTFTELGVAVEITDALEALGINRTFAIQEYTLPIALDGHDFIGQARTGMGKTYGFGVPLLDRVFDSADVAATDGTPRALVIVPTRELAVQVGDDLQRAATNLPLKIFTFYGGTPYEEQIDALKVGVDVVVGTPGRLLDLHKRGALSLDKVAILVLDEADEMLDLGFLPDIEKILRALTHQHQTMLFSATMPGAILTLARSFLNKPVHIRAETSDASATHKTTRQVVFQAHKMDKEAITAKILQAKDRGKTIIFARTKRTAAQVAEDLASRGFSVGSVHGDMGQPAREKSLNAFRTGKIDILVATDVAARGIDVDDVTHVINYQTPDDPMTYVHRIGRTGRAGHNGTAVTLVGYDETLKWTVIDNELELGQPNPPQWFSTSPELLEALDIPEGVTERVGPPTKVLGGTAPRPPRRTRK

SEQ ID NO: 180 - protein, 368 aa, Corynebacterium glutamicum
  source: /note="ncgl0767"
MRPEFSAELSELDSTLTTIEKVLNSQEMSDRVRELEAQAADPSLWDDPDHAQQVTSELSHVQAELRKITDLRQRIEDLPIMVELAEEEDGDTSIAEEELADLRSLIDALEVKTMLSGEYDAREAVINIRFGAGGVDAADWAEMLMRMYTRWAEKNGHKVDIYDISYAEEAGIKSATFVVHGDYMYGQLSVEQGAHRLVRISPFDNQGRRQTSFAEVEVLPVVEKVDSIDIPDADVRVDVYRSSGPGGQSVNTTDSAVRLTHIPTGIVVTCQNEKSQIQNKASAMRVLQAKLLERKRQEERAEMDALGAGGNASWGNQMRSYVLHPYQMVKDLRTNFEVNDPQKVLDGDIDGLLEAGIRWRMAESQSAE

SEQ ID NO: 181 - protein, 256 aa, Corynebacterium glutamicum
  source: /note="ncgl0813"
MPEGDSVFQLSRKLQFMRGREVLETSLRVPSVALHDFTGQTVNRVWPYGKHLFMQFGEEILHTHLKMEGTWAVHRKGDRWRKPGHTARVVLVLSENIEVVGHSLGFVRVFPANRYSEEIAYLGPDVLAEEFDINTARNNIASNPSRTIGEALLDQSNLAGVGNEYRAEICFLMGVHPATQVGYVDVEKALKITRRLMWENRNSPIRVTTGVRRAGESTYVFGRNNKPCRRCRTPIVKAELGERIIWWCPRCQPLNS

SEQ ID NO: 182 - protein, 169 aa, Corynebacterium glutamicum
  source: /note="ncgl0823"
MSIKHALLVLMLDEPTSASQLQTKFEETMGIWQLNIGQVTQTIQRLQRDGLAETAGTTVSSNGRTVDTFQPTDLGRELVAQWFESPVTVTLSERDELVTKIAIAESRGLNLIPLLDIQRNTVMAELRALNKSSRDLAETRNTQRLLVEKRIFELEAQARWLDRIEALEQ

SEQ ID NO: 183 - protein, 520 aa, Corynebacterium glutamicum
  source: /note="ncgl0827"
MSDDRKAIKRALISVYDKTGLEDLAQALHRANVEIVSTGSTAAKIAELGIPVTPVEELTGFPECLEGRVKTLHSKVHAGILADTRKEDHLRQLKELEVAPFQLVVVNLYPFAETVASGADFDACVEQIDIGGPSMVRAAAKNHPSVAVVVSPNRYEDVQEALKTGGFSRAERTKLAAEAFRHTATYDVTVATWMSEQLAAEDSETEFPGWIGTTNTLSRSLRYGENPHQSAALYVGNTRGLAQAKQFHGKEMSYNNYTDSDAAWRAAWDHERPCVAIIKHANPCGIAVSDESIAAAHREAHACDSVSAFGGVIASNREVSVEMANQVAEIFTEVIIAPSYEEGAVEILSQKKNIRILQAEAPVRKGFESREISGGLLVQERDLIHAEGDNSANWTLAAGSAVSPEVLKDLEFAWTAVRSVKSNAILLAKNGATVGVGMGQVNRVDSARLAVDRAGAERATGSVAASDAFFPFADGFEVLAEAGITAVVQPGGSIRDNEVIEAANKAGVTMYLTGARHFAH

SEQ ID NO: 184 - protein, 386 aa, Corynebacterium glutamicum
  source: /note="ncgl0853"
MSFAEHAIIWHVYPLGALGAPIRPESPAPVTHRLPNLIGWLDYVVELGCNALMLGPVFESVSHGYDTLDFYRIDPRLGTEEDMDALLEAANQRGIGVLFDGVFNHVSSSSKYLDLTTGVSFEGHDILAELDHTNPAVVDLVVDVMNHWLDRGIAGWRLDAVYAIAPEFWEKVLPEVRRKHPHAWIVGEMIHGDYSDYVKSSGIDSVTEYELWKAIWSSIKERNFFELEWTLSRHNEFLDTFVPQTFIGNHDVTRIATRIGQSNAILAAAILFTVGGTPSIYYGDEQGFTGLKEDNVFGDDAIRPPLPAEFSPLGTWIENIYKALIALRRQHPWLYQAHTEVLEIANEAMTYKSVGLGGEELTVHLDLEEVSVRILDGEKVLFQYSA

SEQ ID NO: 185 - protein, 312 aa, Corynebacterium glutamicum
  source: /note="ncgl0874"
MKITAKAWAKTNLHLGVGPARDDGFHELMTVFQTIDLFDTVTLTTLDEELVEEGSVVKQLSVTGARGVPEDASNLAWRAVDALVKRRAEKTPLPAVSLHIAKGIPVAGGMAGGSADAAATLRAVDAWIGPFGEDTLLEVAAELGSDVPFCLLGGTMRGTGRGEQLVDMLTRGKLHWVVAAMAHGLSTPEVFKKHDELNPESHMDISDLSAALLTGNTAEVGQWLHNDLTSAALSLRPELRSVLQEGTRSGAHAGIVSGSGPTTVFLCESEHKAQDVKEALIDAGQVYAAYTATGPAASTADQRGAHILTVSQ

SEQ ID NO: 186 - protein, 160 aa, Corynebacterium glutamicum
  source: /note="ncgl0877"
MSSLDNAPLLELDVQEWVNHEGLSNEDLRGKVVVVEVFQMLCPGCVNHGVPQAQKIHRMIDESQVQVIGLHSVFEHHDVMTPEALKVFIDEFGIKFPVAVDMPREGQRIPSTMKKYRLEGTPSIILADRKGRIRQVQFGQVDDFVLGLLLGSLLSETDET

SEQ ID NO: 187 - protein, 325 aa, Corynebacterium glutamicum
  source: /note="ncgl0905"
MTAHWKQNQKNLMLFSGRAHPELAEAVAKELDVNVTPMTARDFANGEIYVRFEESVRGSDCFVLQSHTQPLNKWLMEQLLMIDALKRGSAKRITAILPFYPYARQDKKHRGREPISARLIADLMLTAGADRIVSVDLHTDQIQGFFDGPVDHMHAMPILTDHIKENYNLDNICVVSPDAGRVKVAEKWANTLGDAPMAFVHKTRSTEVANQVVANRVVGDVDGKDCVLLDDMIDTGGTIAGAVGVLKKAGAKSVVIACTHGVFSDPARERLSACGAEEVITTDTLPQSTEGWSNLTVLSIAPLLARTINEIFENGSVTTLFEGEA

SEQ ID NO: 188 - protein, 656 aa, Corynebacterium glutamicum
  source: /note="ncgl0916"
MEVTQSTFLKSVAAFTVAALTLTISSCSSGEDTSASSTDTENSSTQAASPPLAPCELPADASAEEEVEGTHTGEDISVAPEIGTGYREGMTPVQTQGYAVATANPIASEAACAVLREGGTAADALVTAQFVLGLTEPQSSGLGGGGYILYYDAEANAVTAIDGRETAPVAADENYLIHVSAEDQTTPVPDARRSGRSIGVPGIVAALGQLHDSFGKTSWQDVLTTPQQLATDGFSISPRMSASIANSAEDLSHDPEAAAYFLDENGDAKAPGTLLQNPDYAETIRLISEGGPDAFYTSEIAADIVERATREVDGFTPSLMSTADLAAYTPENREALCAPYRDKIVCGMPPSSSGGVTVMETLGILNNFDLAQYPPTEVGLDGGLPNAEAVHLISEAERLAYADRDAYIGDPAFVEVPAGGVEELISDVYTGKRSELIDPEHSMGQATAGLSQEPVMAALPESGTSHISIIDSYGNAASLTTSVEAAFGSFHFTRGFILNNQLTDFSAEPLDEDGEPVANRVESAKRPRSSMSPMLVFNASGDGEIADLNMVLGSPGGSLIIQYVVKTLVNIIDWDMDPQQAVSAPNFGVMNQPKTGLGSEHPLIANDSAELVTELESKGHEVNVGEQSSGLSALVKNGDTIVGGADPRREGVVLGG

SEQ ID NO: 189 - protein, 414 aa, Corynebacterium glutamicum
  source: /note="ncgl0966"
MAFGFFSRRKKKNKDKNPNENSAVPAHSEDSPQEVFEGNGRQVGDPIEQQVDRDAKGRLTAADFLPDADLPQLNRSRANMLRRELEYRFSLQNAHINIDGNTAMIQRSDGGAAHVSLRTLAMNAAGLDNFDQLPELVESFVHGTLADATLNDLSTADLYKALRLRLLPTPGEGDDLVEHGLDRESQIRDDSILRTFTSDMSIALVLDTEHAIRIQPLKELEEFDDLSALERAADRNTWQELYDANVDASFVDAESDSEGSSFWAFESNSYYLGSAPLFLNDLLAKWAPDLDQSDGVIFAVPDRDLLIARPVTTGEDLMNGITAMVRIAMRFGLGNPTSISPRLHLLRDNQVTTFTDFRVVSPEMEAEWEDSAFDAPPAGAIGIEVRPDPYLMERLQQGGFGDFGDFGKPRDLDM

SEQ ID NO: 190 - protein, 256 aa, Corynebacterium glutamicum
  source: /note="ncgl1065"
MAPKQTPSPEKNRNLVGPVLQRRQTEGTFDQRLLEMRADHNWKHADPWRVLRIQSEFVAGFDALHEMPKAVTVFGSARIKEDHPYYKAGVELGEKLVAADYAVVTGGGPGLMEAPNKGASEANGLSVGLGIELPHEQHLNPYVDLGLNFRYFFARKTMFLKYSQAFVCLPGGFGTLDELFEVLCMVQTGKVTNFPIVLIGTEFWAGLVDWIRHRLVEEGMIDEKDVDRMLVTDDLDQAVKFIVDAHAGLDVARRHN

SEQ ID NO: 191 - protein, 162 aa, Corynebacterium glutamicum
  source: /note="ncgl1124"
MTTPRWLSTEEQQLWRMILSATRKMERTLDETLVENHNLTTSEFAVLVTLSEATGQQMRLRDMCQELDWDRSRTSHQVTRMDKKGLVAKVKCAGDARGVNVEITPEGERRLKDAVPAHVETVRQLIFDPMEEHHMEGLRSYLTAVLNSNTCIEINNQRAAEL

SEQ ID NO: 192 - protein, 309 aa, Corynebacterium glutamicum
  source: /note="ncgl1137"
MAIELNVGRKVTVTVPGSSANLGPGFDTLGLALSVYDTVEVEIIPSGLEVEVFGEGQGEVPLDGSHLVVKAIRAGLKAADAEVPGLRVVCHNNIPQSRGLGSSAAAAVAGVAAANGLADFPLTQEQIVQLSSAFEGHPDNAAASVLGGAVVSWTNLSIDGKSQPQYAAVPLEVQDNIRATALVPNFHASTEAVRRVLPTEVTHIDARFNVSRVAVMIVALQQRPDLLWEGTRDRLHQPYRAEVLPVTSEWVNRLRNRGYAAYLSGAGPTAMVLSTEPIPDKVLEDARESGIKVLELEVAGPVKVEVNQP

SEQ ID NO: 193 - protein, 810 aa, Corynebacterium glutamicum
  source: /note="ncgl1152"
MTTTDNTAANQGELTALRLPDLRKIAADLGLKGTSALRKGDLINAISAAREGKPTAAAKKTSPRKAPSRTRATQPSAPVEQAQEAPAQTSTAPASAPSEETPAAPARRGRRRVTTTATTPEPAAPAQSQPAEAQPAQTQAAQQEELPVAAKESAPATENTQGQSQGQAQGDEHDDRFESRSAARRARRNRQRQIHRDGDDNANANTESEQNTPAQNATAQAESEQTAAPAQAEAAEQNQNDNSESSENRSDNYRNNNRRSRNNRNNRNYRDNNESSDNAGQSSNDDADNNQARSEDNNDDRRSRNNRNNDRNDRNNRNYRDNNESSDNAGQSSNDDADNNQARSEDNNDDRRSRNNRNNDRNDRNDRNYRDNHNDDNDDRRNRRGRRNRRGRNDRNDRDNRDNRDNRDNSNDGDNNQQDELQQVAGILDIVDHNVAFVRTTGYHAAPSDVFVSNQLIRRMGLRSGDAIEGQVRMNQGGGNHNNHGRNRQKYNNLVRVEMVNGLPAEETRNRPEFGKLTPLYPNQRLHLETEQKILTTRVIDLIMPIGKGQRALIVSPPKAGKTTILQNIANAISTNNPECYLMVVLVDERPEEVTDMQRSVNGEVIASTFDRPPSEHTAVAELAIERAKRLVEQGQDVVVLLDSITRLGRAYNNSSPASGRILSGGVDSNALYPPKRFLGAARNIENGGSLTIIATAMVETGSAGDTVIFEEFKGTGNAELKLDRKISERRVFPAVDVNPSGTRKDELLLNPDEARIMHKLRRILSALDNQQAIDLLIKQLKKTKSNAEFLMQVASSAPMAGTEKEEDYS

SEQ ID NO: 194 - protein, 75 aa, Corynebacterium glutamicum
  source: /note="ncgl1187"
MHMNAEEIGMALLNGRKELGLRQGELADLAGVSERFIRDVEKGKTTVRLDKVIDVLSVLGLELSVGIHDPLKVNQ

SEQ ID NO: 195 - protein, 680 aa, Corynebacterium glutamicum
  source: /note="ncgl1196"
MTEDNAQLRRTWNDLAEKVRYHRDRYYNEQPEIPDADFDALFKQLQQLEEDHPELAVPDSPTMVVGAPVAEQSSFDNVEHLERMLSLDNVFDEQELRDWLGRTPAKQYLTELKIDGLSIDLVYRNGQLERAATRGDGRVGEDITANARVIEDIPHQLQGTDEYPVPAVLEIRGEVFITVEDFPEVNAQRIADGGKPFANPRNAAAGSLRQKNIEDVKKRRLRMISHGIGFTEGFSPASQHDAYLALAAWGLPTSPYTEAVTDPEDVVKKVSYWADHRHDALHEMDGLVIKVDDIASQRALGSTSRAPRWAIAYKYPPEEVTTKLLDIQVGVGRTGRVTPFAVMEPVLVAGSTVSMATLHNQSEVKRKGVLIGDTVVIRKAGEVIPEVLGPVVELRDGTEREYIFPTLCPECGTRLAPAKADDVDWRCPNMQSCPGQLSTRLTYLAGRGAFDIEALGEKGADDLIRTGILLDESGLFDLTEDDLLSSNVYTTNAGKVNASGKKLLDNLQKSKQTDLWRVLVALSIRHVGPTAARALAGRYHSIQALNDAPLEELSETDGVGTIIAQSFKDWFEVDWHKAIVDKWAAAGVTMEEEVGEVAEQTLEGLTIVVTGGLEGFTRDSVKEAIISRGGKASGSVSKKTDYVVVGENAGSKATKAEELGLRILDEAGFVRLLNTGSADE

SEQ ID NO: 196 - protein, 346 aa, Corynebacterium glutamicum
  source: /note="ncgl1202"
MEDMRIATLTSGGDCPGLNAVIRGIVRTASNEFGSTVVGYQDGWEGLLADRRVQLYDDEDIDRILLRGGTILGTGRLHPDKFKAGIDQIKANLEDAGIDALIPIGGEGTLKGAKWLSDNGIPVVGVPKTIDNDVNGTDFTFGFDTAVAVATDAVDRLHTTAESHNRVMIVEVMGRHVGWIALHAGMAGGAHYTVIPEVPFDIAEICKAMERRFQMGEKYGIIVVAEGALPREGTMELREGHIDQFGHKTFTGIGQQIADEIHVRLGHDVRTTVLGHIQRGGTPTAFDRVLATRYGVRAARACHEGSFDKVVALKGESIEMITFEEAVGTLKEVPFERWVTAQAMFG

SEQ ID NO: 197 - protein, 369 aa, Corynebacterium glutamicum
  source: /note="ncgl1203"
MASETSSPKKRATTLKDIAQATQLSVSTVSRALANNASIPESTRIRVVEAAQKLNYRPNAQARALRKSRTDTIGVIIPNIENPYFSSLAASIQKAAREAGVSTILSNSEENPELLGQTLAIMDDQRLDGIIVVPHIQSEEQVTDLVDRGVPVVLADRSFVNSSIPSVTSDPVPGMTEAVDLLLAADVQLGYLAGPQDTSTGQLRLNTFEKLCVDRGIVGASVYYGGYRQESGYDGIKVLIKQGANAIIAGDSMMTIGALLALHEMNLKIGEDVQLIGFDNNPIFRLQNPPLSIIDQHVQEIGKRAFEILQKLINGDTAQKSVVIPTQLSINGSTAVSQKAAAKAAKAAQKAAAKAAQNTQHEVSLDGEL

SEQ ID NO: 198 - protein, 212 aa, Corynebacterium glutamicum
  source: /note="ncgl1208"
MQFAQNPRLTNDAVILEPLSHQWTQDLQEAVASQELWRHWFVALPTPEGMAEEIDRRLAEHADGLCAPWAIISAATGRAVGMTSFHTLDHANKRLEIGRTWMAAHVQGTGINPSVKFLQLQRAFEDLGVNAVEFRTNWHNHRSRAAIERLGAKQDGVLRKHRIHPDGTVRDTVIYSITNDEWPAVKLTLMERLYRHMQVPIIPNEASLFDAS

SEQ ID NO: 199 - protein, 235 aa, Corynebacterium glutamicum
  source: /note="ncgl1261"
MGQQEIIEDSTESGIKVLDRTVLILNVIAEQPRSLAELAAATDLPRATAHRLASALEVHGMLARSRDNRWTIGARLASLGARGADTLIDTAVPIMADLMERTGESVQLYRLTGTTRTCVASQEPSSGLKNVVPVGTRMPLNAGSAARVFAAYLPIPSASVFSREELDQVRATGLAESVGERELGLASLSSPVFDSNGSMIAALSISGVAERLKPHPAAMWGTELIDAAERLGALL

SEQ ID NO: 200 - protein, 417 aa, Corynebacterium glutamicum
  source: /note="ncgl1262"
MTSPVENSTSTEKLTLAEKVWRDHVVSKGENGEPDLLYIDLQLLHEVTSPQAFDGLRMTGRKLRHPELHLATEDHNVPTEGIKTGSLLEINDQISRLQVSTLRDNCEEFGVRLHPMGDVRQGIVHTVGPQLGATQPGMTIVCGDSHTSTHGAFGSMAFGIGTSEVEHVMATQTLPLKPFKTMAIEVTGELQPGVSSKDLILAIIAKIGTGGGQGYVLEYRGEAIRKMSMDARMTMCNMSIEAGARAGMIAPDQTTFDYVEGREMAPKGADWDEAVAYWKTLPTDEGATFDKVVEIDGFALTPFITWGTNPGQGLPLSETVPNPEDFTNDNDKAAAEKALQYMDLVPGTPLRDIKIDTVFLGSCTNARIEDLQIAADILKGHKIADGMRMMVVPSSTWIKQEAEALGLDKIFTDAGAE

SEQ ID NO: 201 - protein, 360 aa, Corynebacterium glutamicum
  source: /note="ncgl1267"
MSNSNSGKVRVAVVYGGRSSEHSVSCVSAGAIMAHLDPEKYDVIPVGITVDGAWVVGETDPQKLTLIDRTMPEVEHREEVRPSLDPAHRGEFHFSDGSLYATADVIFPVLHGRFGEDGTVQGLFALSDIPVVGPGVLASAAGMDKEYTKKLMAAEGLPVGREVILRDRTELTEAEKNLLVLPVFVKPARGGSSIGISRVTAWEDFNKAVGLARAHDEKVIVESEIVGSEVECGVLQYPDGRIVASVPALLSGTESGAGGFYDFDTKYLDNVVTAEIPAPLDEKTTELIQSLAVESFQALACEGLARVDFFVTANGPVLNEINTMPGFTPISMYPQMFTASGVAYEELLDVLVQQALHRDN

SEQ ID NO: 202 - protein, 325 aa, Corynebacterium glutamicum
  source: /note="ncgl1301"
MIAYAGTTGTCLKVSPNAYVEDMDVHADTREFLTSRRNRLTPKDAGLPIYQGKRRVPGLRREEVAMLAGVSVDYYTRLERGNLSGVSEQVLSALATALQLDDAETQHLFDLAKLSNSPASRRKRTPAPKSVLRPEVLRILNSMHDIPAYIRSESRDLLAANTFGRALYAPLYESTVDDGISGEPGSINVARFTFLDPAAREFFPEWERTSADLVASLRTVAAQRPNDTLFSNLIGELVTKSEVFAQMWADHNVRMHRTGSKKIVHPLVGEMELDFETLDLPADPNIALVVYSAAEGSTSAMNLQLLANWTGNDSPSLSTELGDTI

SEQ ID NO: 203 - protein, 304 aa, Corynebacterium glutamicum
  source: /note="ncgl1320"
MIRKLARPMLASVYVADGAESVLNTSAHVEGTQVVLDRIRYVLPRKYAKRISRDPELVTRVIGGTKVGAGSLLAIGRAPRTSAATLAILTIPNILARNAFWETQDADEKRNRRNGFLTNIALIGGLFITSVDTEGKPGVKWRATNAAKRGKKQLQQALPTKSETEKFGEKASDWFNDTSDKVTEYAYTAQDFVGENKDDWIKSATETAHKVADTVSDYAHKATSYLEENSGDWLEAAQANAKTARKSAVKAAGKAQEKANFALQVAEETSGRANKKATKSYDKLQKQADKAIDRAQKKLKGIEL

SEQ ID NO: 204 - protein, 949 aa, Corynebacterium glutamicum
  source: /note="ncgl1322"
MADRLVVRGAREHNLKGVDIDLPRDSMVVFTGLSGSGKSSLAFDTIFAEGQRRYVESLSSYARMFLGQMDKPDVDLIDGLSPAVSIDQKSTNRNPRSTVGTITEVYDYLRLLYARAGTAHCPVCDARVERQTPQQMVDQILGMEEGLKFQILAPVVRTRKGEFVDLFADLASQGYSRVRVDGEVHQLSDPPKLEKQIKHDIDVVVDRLQVKASQKQRLTDSMETALRLADGVAVLEFVGLEEDDPNRLRRFSEKMSCPNGHALTVDELEPRAFSFNSPYGACPACDGLGVRTEVDIDLIIPDPDAPATKAVQPWNSSPNHSYFEKLIEGLAKALGFDPETPYSELTAAQKKALVYGSKEEVSVRYKNRYGRVRSWTAPFEGVMGYFDRKLEQTDSETQKDRLLGYTREVPCPTCKGARLKPEILAVRLDSGSHGALSIAGLTALSVHEAFEFLDNLTLGKREEMIAGAVLREIHARLKFLLDVGLSYLTLDRAAGTLSGGEAQRIRLATQIGSGLAGVLYVLDEPSIGLHQRDNQRLITTLEHLRDIGNTLIVVEHDEDTIRRADWLVDIGPRAGEFGGEVVYQGEPKGILDCEESLTGAYLSGRRTLGVPDTRREIDKERQLKVVGARENNLRGIDVKIPLGVLCCITGVSGSGKSTLVNQILAKVLANKLNRARQVPGRAKRVEGLEHLDKLVQVDQSPIGRTPRSNPATYTGVFDKVRNLFAETTEAKVRGYKPGRFSFNIKGGRCEACQGDGTLKIEMNFLPDVYVPCEVCDGQRYNRETLEVKYKGKNIAEVLGMPISEAADFFEPITSIHRYLATLVDVGLGYVRLGQAATTLSGGEAQRVKLAAELQKRSNGRTVYILDEPTTGLHFEDIRKLMMVIQGLVDKGNSVIIIEHNLDVIKAADWIVDMGPEGGSGGGTVVAEGTPEQVAEVAGSYTGQFLKELL

SEQ ID NO: 205 - protein, 304 aa, Corynebacterium glutamicum
  source: /note="ncgl1364"
MKARVLAKTWLTHLAVERGLSANTLSNYRRDVERYCDWLEAAGLDDIRDITTANVESYVKDLRRGIDGQQALSASSAGRALIVARGLHKFALMEGEVAADVAADVSPPAMGRHLPDTLSINEVALLIDAIPHSDIATPVDLRDRALVELLYGTGARISEAIGLAVDDVSEMPEVLRITGKGSKQRIVPFGSMAQQAVREYLVRARPALSKGKSHALFLNQRGGPLSRQSAWAVLKKTVERAGLDKDISPHTLRHSFATHLLEGGADVRVVQELLGHSSVTTTQIYTHITADSLREVWRGAHPRA

SEQ ID NO: 206 - protein, 290 aa, Corynebacterium glutamicum
  source: /note="ncgl1366"
MSDAGKKDSSKVEIGLTGRPLRELPEPSPLEKHGPATIIAMANQKGGVGKTTSTINLGACLAEAGRKVLLVDLDPQGALTAGLGIHYDDVDITVYDLMVDNNSTIDQAIHHTGVPDLDVVPANIDLSAAEIQLVNEVGREQTLARALRPVMKDYDFIILDCQPSLGLLTVNALACAHGVIIPMECEYFSLRGLALLTDTVEKVADRLNFDLEILGILVTMFDRRTSHAREVMSRVVEVFDEKVFDTVITRTVRFPETSVAGEPIITWAPTSQGAEQYRSLAREVISRVND

SEQ ID NO: 207 - protein, 320 aa, Corynebacterium glutamicum
  source: /note="ncgl1371"
MTPPARRDGTPDKKQSNRSGGYRSSVRGYKPGSSRPNTRQQPQKKDEILLSNAKPAKKQNVKSDDDWSMGFLNRNDSDGVRLQKVLAQAGVASRRHAEILIDQGRVEVNDRIVTTQGVRVDPNNDVIRVDGVRIHINEDLEYFVLNKPRGMHSTMSDELGRPCVGDLVSEKTASGQRLFHVGRLDADTEGLLLLTNDGELANRLMHPKYEVSKTYLATVRGEATNKLVSALRDGVELEDGPAKADFAQIIDVFQGKSLLRIEIHEGRKHIVRRLFDELGFPVERLVRTKLHTVQLGDQKPGSLRALNSSELTSLYKVVQL

SEQ ID NO: 208 - protein, 236 aa, Corynebacterium glutamicum
  source: /note="ncgl1372"
MTEISNMPAGGLIVAIDGPSGTGKSTTSRALATRLSAKYLDTGAMYRVATLHVLNQGIDPADSAAVIAATAVLPLSISDDPASTEVLLAGVDVQKDIRGPEVTQNVSAVSAIPEVRENLVALQRALAAKAHRCVVEGRDIGTAVLVDAPIKAFLTASAEVRAQRRFDQDTAAGRDVDFDAVLADVVRRDELDSTRAASPLKPADDAHIVDTSDMTMDQVLDHLIHLVEASAERSNQ

SEQ ID NO: 209 - protein, 420 aa, Corynebacterium glutamicum
  source: /note="ncgl1457"
MQSWPTPEVPALPGTPVPLELFDTADQEVRLVETPPAGSDTPVGMYVCGITPYDSTHLGHAATYLAFDLIYRILLDNDHDVHYVQNITDVDDPLFERAARDGVDWRDLGTSQINLFRSDMEALSIIPPKDYIGAIESIDEVIEMVKTLLDEGAAYIVEDAEYPDVYASINATDKFGYESNYDAATMAEFFAERGGDPERPGKKNPMDALLWRAAREGEPSWESPFGAGRPGWHIECSAIATNRLGHSFDIQGGGSDLIFPHHEFSAAHAEAAHGVERMAKHYVHAGMISQDGVKMSKSLGNLEFVSRLTAAGHEPGAIRLGVFANHYRGNRDWNAESLATAEQRLATWREAARAATNREDAIAVVEQLRAHLSADLDTPGALAAVDNWAAGIDTTAGSKEFTEVGNIVVAAIDALLGVQL

SEQ ID NO: 210 - protein, 252 aa, Corynebacterium glutamicum
  source: /note="ncgl1484"
MVSVLLVQPRQGEAVAAAERRDFLQATGLKPQELTSRMLDTTTSRIGSLEGFDGVIVGGSPLNATNFEYSDWQRHVHRELSLLINHPLPTIFVCYGNTFLTFFSGGQIGRTHPEDSGATTVLLTDAGKRDVLTQDLPDSFTSFTGHTENSVAPAPGHVVLATGPTCPIQMLRANKNTWSVQFHADMDAVGMKNRMDFYSNYGYFSPEDYDRIIAELPSVDSIYANRVLRNFVEVCEGIRVADGAEHQLPELN

SEQ ID NO: 211 - protein, 421 aa, Corynebacterium glutamicum
  source: /note="ncgl1500"
MSDFLNADGSLNVDKVREEFPILKRTVRDGKPLAYLDSGATSQRPERVWRAEEHFVLHTNAPVHRGAYQLAEEATDAYEGAREKIAAFVGAEQHEIAFTKNATEALNLVAYTLGDDRSGKYRVQAGDTVVITELEHHANLVPWQELCRRTGATLKWYKVTEDGRIDLDSLELDETVKVVAFTHQSNVTGAVADVPELVRRAKAVGALTVLDACQSVPHMPVNFHELDVDFSAFSGHKMLGPAGVGVVYAKSPILDELPPFLTGGSMIEVVTMEGSTYAAAPQRFEAGTQMTSQVVGLGAAVDMLNEIGMEAIAAHEHALTAYALEKLTAIKGLTIAGPLTAEQRGGAISFGVEGIHPHDLGQVLDDQGVNIRVGHHCAWPVHRSMNVQSTARASFYLYNTFEEIDRLAAAIEKAKQFFGVE

SEQ ID NO: 212 - protein, 481 aa, Corynebacterium glutamicum
  source: /note="ncgl1503"
MTSATTNPGVNEPLTDDQIIESIGPYNYGWHDSDDAGASAQRGLSEDVVRDISAKKSEPEWMLQQRLKALSIFDKKPVPTWGADLSGIDFDNIKYFVRSTEKQAQSWEDLPEDIKNTYDKLGIPEAEKQRLVAGVAAQYESEVVYHQIREDLEEKGVIFLDTDTALKEHPEIFQEYFGTVIPAGDNKFSALNSAVWSGGSFIYVPKGVHVDIPLQAYFRINTENMGQFERTLIIVDEDAYVHYVEGCTAPIYKSDSLHSAVVEIIVKKGGRCRYTTIQNWSNNVYNLVTKRTKVEEGGTMEWVDGNIGSKVTMKYPAVWMTGPHAKGEVLSVAFAGEGQFQDTGAKMTHMAPYTSSNIVSKSVARGGGRAAYRGLVQINANAHHSTSNVECDALLVDDISRSDTYPYNDIRNDHVSLGHEATVSQVSEEQLFYLMSRGLAEEEAMAMIVRGFVEPIAKELPMEYALELNRLIELQMEGSVG

SEQ ID NO: 213 - protein, 346 aa, Corynebacterium glutamicum
  source: /note="ncgl1508"
MSTSVAPSNNPVELKPITFWAPTIKVQRILALLLLIFQGGITVTGSIVRVTGSGLGCDTWPLCHEGSLVPVAGAAPWIHQAVEFGNRMLTFVLAAAALALFIAVLGAKRRREILVHSFIQGLGIILQAVIGGITVLVDLHWYAVALHFLPSMILVFMAAILYTRIGEPDDGEITTTFPTWIRNVAVIGAVALSVVLITGTMTTGAGVHSGDASITMDDRLDVSIDLMAHIHGYSMYIYLFFTLIVVAGLYKAKTTKHNKQLGLMLILFILIQAGIGILQYRMGVPRWSIPFHIAMSSVVVAFTSLLWAQGRIRVGGKATVTGSVDGDIKNEIITNPFEKKSKQPVK

SEQ ID NO: 214 - protein, 323 aa, Corynebacterium glutamicum
  source: /note="ncgl1511"
MSDLKMQRSGGEPLDTIKAYIALTKPRVIELLLVATIPTMLQAERGENNIVLILLTVFGGWMGAAAANTFNMVADSDIDQRMGRTRARPLVRHTVSNRDASIFAWVLTVASFLWLWLLCDSMLAGIFVLITIFFYIFVYTKWLKRRTHMNIVWGGAAGCMPVLVGWAVIVDQFEPGVPQQWWQAIVLFMVIFFWTPPHTWALAMKYREDYKAAGVPMLPVVRTPVQVTAQIVWYSVATVLTTFLLIPATGWIYAAIAVISGVTFLFMAIKLHLGIKNGGKVKPLKLFILSNNYLAVLFVALSVDAVLGLETIGEMLGWTTTFF

SEQ ID NO: 215 - protein, 106 aa, Corynebacterium glutamicum
  source: /note="ncgl1545"
MALPQLTDEQRKAALAKAAEARKARAELKENLKRGNTNLREVLDKAESDEIIGKTKVSALLEALPKVGKVKAKEIMDELGIAQTRRLRGLGDRQRRALLERFGFED

SEQ ID NO: 216 - protein, 312 aa, Corynebacterium glutamicum
  source: /note="ncgl1550"
MKHLLSISDLSKDEIVGLLDEADRFKEVLEGREVKKLPTLRGRTIFTLFYENSTRTRSSFETAGKWMSADVINISASSSSVKKGESLKDTGLTLSAIGADAIIMRHPASGAAQQLAQFVAPGGNGPSVINAGDGSHQHPTQALLDALTIRQRTGRIEGLKVVIVGDCLHSRVVRSNVDLLSTLGAEVVLVAPPTLLPIGVENWPVRFSYDMDAEIADADVVMMLRVQQERMQGGFFPSHREYATLYGMSKEREARLKDSAIIMHPGPMLRGMEINFQVADAPRTAVLQQVSNGVHMRMAILFALVAGSDATI

SEQ ID NO: 217 - protein, 449 aa, Corynebacterium glutamicum
  source: /note="ncgl1583"
MAISVVDLFSIGIGPSSSHTVGPMRAALTYISEFPSSHVDITLHGSLAATGKGHCTDRAVLLGLVGWEPTIVPIDAAPSPGAPIPAKGSVNGPKGTVSYSLTFDPHPLPEHPNAVTFKGSTTRTYLSVGGGFIMTLEDFRKLDDIGSGVSTIHPEAEVPCPFQKSSQLLAYGRDFAEVMKDNERLIHGDLGTVDAHLDRVWQIMQECVAQGIATPGILPGGLNVQRRAPQVHALISNGDTCELGADLDAVEWVNLYALAVNEENAAGGRVVTAPTNGAAGIIPAVMHYARDFLTGFGAEQARTFLYTAGAVGIIIKENASISGAEVGCQGEVGSASAMAAAGLCAVLGGSPQQVENAAEIALEHNLGLTCDPVGGLVQIPCIERNAIAAMKSINAARLARIGDGNNRVSLDDVVVTMAATGRDMLTKYKETSLGGLATTLGFPVSMTEC

SEQ ID NO: 218 - protein, 686 aa, Corynebacterium glutamicum
  source: /note="ncgl1607"
MNTTDTAVANLVVFEVPAGTAIGAAMRELDLPNKGPEAIVCAKDAEGQLKDLSHVPETTATFTAVPANTDDGRAVIRHSCAHVLAQAVQAEFPGTKLGIGPAIENGFYYDFDVAEPFTPEDLKTIEKRMKKIIKTGQKFERRVYESAEAAAEELKNEPYKLELIQDKGNVDPNSDEATEVGAGELTAYDNVNPRTSEVEWSDLCRGPHIPTTRYIPAFALTRSSAAYWRGDQDNAGLQRIYGTAWEDKESLDAYQTMLAEAEKRDHRRLGTELDLFSFPDDLGSGLPVFHPNGGIVRNEMEDHSRRRHIAAGYSFVNTPHITKQDLFERSGHLGFYKDGMFPPMQVDAEFDEDGNVTKPGQEYYLKPMNCPMHNLIFDSRGRSYRELPLRLFEFGNVYRYEKSGVIHGLTRARGFTQDDAHIYCTEDQLEAELTSVLDFILSLLRDYGLDDFYLELSTRDPKKSVGSDEIWERSTEILNRVATNSGLELVPDPEGAAFYGPKISVQARDAIGRTWQMSTVQLDFNMPERFNLEYTSSDGSKQQPIMIHRALFGSIERFFGVLLEHYAGAFPAWLAPHQVMGIPVADDCIPHLETITAQLREKGIRADVDTSDDRMQKKIRNHTTGKVPFMLLAGARDVEANAVSFRFLDGTQVNGVPVDEAIAVISSWIGDRINDQPSEDSIAARR

SEQ ID NO: 219 - protein, 253 aa, Corynebacterium glutamicum
  source: /note="ncgl1855"
MAIEKKPAGARGSRGSRTVKTLPNGKPDPASLSDRQRRILEVIRDAVVLRGYPPSIREIGDAAGLQSTSSVAYQLKELEKKGFLRRDPNKPRAVDVRHLPETESRSSKAATQAKSKAPQAGVHDPELAGQTSFVPVVGKIAAGSPITAEQNIEEYYPLPAEIVGDGDLFMLQVVGESMRDAGILTGDWVVVRSQPVAEQGEFVAAMIDGEATVKEFHKDSSGIWLLPHNDTFAPIPAENAEIMGKVVSVMRKL

SEQ ID NO: 220 - protein, 568 aa, Corynebacterium glutamicum
  source: /note="ncgl1858"
MATVADVNQDTVLKGTGVVGGVRYASAVWITPRPELPQAGEVVAEENREAEQERFDAAAATVSSRLLERSEAAEGPAAEVLKATAGMVNDRGWRKAVIKGVKGGHPAEYAVVAATTKFISMFEAAGGLIAERTTDLRDIRDRVIAELRGDEEPGLPAVSGQVILFADDLSPADTAALNTDLFVGLVTELGGPTSHTAIIARQLNVPCIVASGAGIKDIKSGEKVLIDGSLGTIDRNADEAEATKLVSESLERAARIAEWKGPAQTKDGYRVQLLANVQDGNSAQQAAQTEAEGIGLFRTELCFLSATEEPSVDEQAAVYSKVLEAFPESKVVVRSLDAGSDKPVPFASMADEMNPALGVRGLRIARGQVDLLTRQLDAIAKASKELGRGDDAPTWVMAPMVATAYEAKWFADMCRERGLIAGAMIEVPAASLMADKIMPHLDFVSIGTNDLTQYTMAADRMSPELAYLTDPWQPAVLRLIKHTCDEGARFNTPVGVCGEAAADPLLATVLTGLGVNSLSAASTALAAVGAKLSEVTLETCKKAAEAALDAEGATEARDAVRAVIDAAV

SEQ ID NO: 221 - protein, 380 aa, Corynebacterium glutamicum
  source: /note="ncgl1880"
MAPKKTATKATAAKGNDRQKALDAALALIEKDFGKGAVMRLGDENRPPIQTISSGNTAIDIALGIGGFPRGRIVEVYGPESSGKTTVALHAIAQAQKAGGIAAFIDAEHALDPDYARKLGVDTDALLVSQPDTGEQALEIADMLVRSGAIDIIVIDSVAALTPKAEIEGEMGDSHVGLQARLMSQALRKMTGALYNSGTTAIFINQLREKIGVMFGSPETTTGGKALKFYASVRCDIRRIQTLKDGQDAIGNRTRLKVVKNKVSPPFKIAEFDIMYGEGISRESSVIDLAVDNGIVKKSGSWFTYEGEQLGQGKEKVRLSLKENPELTDELEDKIFKKLGVGKYAAASDELTDDPVELVPNVDFDDEADTEADTEADAED

SEQ ID NO: 222 - protein, 276 aa, Corynebacterium glutamicum
  source: /note="ncgl1886"
MANPFSKAWKYLMALFDSKIEENADPKVQIQQAIEDAQRQHQELSQQAAAVIGNQRQLEMQLNRRLAEIEKLQGNTRQAIQLADKARADGDVKKATEYENAAEAFAAQLVTAEQSVEDTKQLHDQALQQADQAKKAVERNSMALQQKVAERTKLLSQLEQAKMQEKVSESLKSMDSLTSGSTPNLDQVREKIERRYANALGQAELASNSVEGRMAEVEQAGVQMAGHSRLEQIRAEMAGGSLTAGNKQESIEAPAAGNNVTDDAVAQRMRELRGEA

SEQ ID NO: 223 - protein, 753 aa, Corynebacterium glutamicum
  source: /note="ncgl1900"
MSDVKYFEDTEFGLIEAVATIDNGDFGTRTIRFETGQLARQADGAVTTYLDDDTMLLATTTASNQPREGFDFFPLTVDVEERMYAAGRIPGSFFRREGRPSTEAILACRLIDRPLRPTFVKGLRNEVQIVVTVMSMNPEDYYDVVAINGASAATRISGLPVSGAVGGVRMALVVDEKHPEGQWVAFPTHAQHEQSVFEIVVAGRLVERKRGNKTFSDVAVMMVEAGASENVVNRVKDGAPAPTEKIVSDGLEAAKPFIDILCRAQEGLAQRVGNAAKEFPLFPPYTDEVYSAVERKVSKKLASLLTLKAKQERDDATNAYMEEIEAELLPKFEASYSSAAEASKEIRAAYNAVMKAIVRRMILTDHFRIDGRGVTDIRDLAVEVELIPRAHGSSLFERGETQILGVTTLDMLKMEQQIDSLAPGDAKRYMHHYNFPPYSTGETGRVGSPKRREIGHGALAERAVLPVIPSREEFPYAIRQVSEALGSNGSTSMGSVCASTLSLYNAGVPLKAPVAGIAMGLVSGEIDGKTEYVALTDILGAEDAFGDMDFKVAGTADFITALQLDTKLDGIPSKVLSDALEQARDARLTILNTMADVINGADEMSKFAPRITTVKIPVAKIGELIGPKGKNINALTEETGANISIEDDGTVFISAADGASAEAAIEKINALANPQLPKVGERFLGTVVKTTAFGAFVSLLPGRDGLVHISKLGNGKRVEKVDDVVKVGEKIQVEIADIDNRGKISLVPVVEED

SEQ ID NO: 224 - protein, 217 aa, Corynebacterium glutamicum
  source: /note="ncgl1905"
MLDESLFPNSAKFSFMKTGDAVNLDHFHQLHPLEKALVAHSVDIRKAEFGDARWCAHQALQALGRDSGDPILRGERGMPLWPSSVSGSLTHTDGFRAAVVAPRLLVRSMGLDAEPAEPLPKDVLGSIARVGEIPQLKRLEEQGVHCADRLLFCAKEATYKAWFPLTHRWLGFEQAEIDLRDDGTFVSYLLVRPTPVPFISGKWVLRDGYVIAATAVT

SEQ ID NO: 225 - protein, 112 aa, Corynebacterium glutamicum
  source: /note="ncgl1911"
MFHDDAVTASSGQFSSRTSIRIRTCIATRERKPDSELLRVVQSPELPGVILPDPKRRMPGRGAWLTPSIDALDLAEQRRAFGRALRVSTTVDTGHVRTYLAENAGPDFCKED

SEQ ID NO: 226 - protein, 465 aa, Corynebacterium glutamicum
  source: /note="ncgl1928"
MSEQPASIKHYDLIIIGTGSGNSIPGPEFDDKSIAIVEKGAFGGTCLNVGCIPTKMYVYAADIAQEIQESARLGIDATVNSVDWPSIVSRVFDKRIDLIAQGGEAYRRGPETPNIDVYDMHASFVDSKTISTGIAGQEQLISGTDIVIATGSRPYIPEAIAESGARYYTNEDIMRLPQQPESLVIVGGGFIALEFAHVFEALGTKVTILNRSDVLLREADADISAKILELSKKRFDVRLSTAVTAVHNKADGGVKISIDTGDDIEADILLVATGRTPNGNQMNLDAAGIEMNGRSIKVDEFGRTSVEGVWALGDVSSPYKLKHVANAEMRAIKHNLANPNDLQKMPHDFVPSAVFTNPQIAQVGMTEQEAREAGLDITVKIQNYSDVAYGWAMEDKDGFVKLIADKDTGKLVGAHIIGAQASTLIQQLITVMAFGIDAREAATKQYWIHPALPEVIENALLGLEF

SEQ ID NO: 227 - protein, 243 aa, Corynebacterium glutamicum
  source: /note="ncgl1948"
MTTSSEQPRTGYKRVMLKLGGEMFGGGKVGVDPDVVDNVARQIAEVAKTGAEIAVVIGGGNFFRGAELQQRGMDRARSDYMGMLGTVMNCLALQDFLGQHGVECRVQTAINMAQVAEPYLPLRAERHLEKGRVVIFGAGMGMPYFSTDTTAAQRALEIGCDVLLMAKAVDGVYSDDPRTNPDAELFTEITPKEVIEKGLKVADATAFSLCMDNKMPILVFNLLTEGNIARAISGERIGTLVES

SEQ ID NO: 228 - protein, 221 aa, Corynebacterium glutamicum
  source: /note="ncgl1961"
MFENRFDLRCYVVTGAGSVDEVVHTASAAARGGAGVVQVRSKPISPEAMRELASKVALEVARCSPTTRVLIDDHLHVASSLMREGLPIHGVHLGQDDVSVLEAHELLGPEAIIGLTTGTLELVAAANELSDVLDYIGAGPFRKTPTKDSGRPPIGLAGYPPLVEFSKVPIVAIGDVTPADVRALSATGVAGVAMVRAFSESDDPQQVAENVVANFELGRLS

SEQ ID NO: 229 - protein, 132 aa, Corynebacterium glutamicum
  source: /note="ncgl2001"
MPKIQFDVLVPDTDSIALAGRFTVVANLLIEKGLMDHGVVVHDPAAKIAEAVEEQLRQTYRDEHEDADLEESSVNRYLIEVDGVKGSVNQVTMIFARLLTPPAELPKDAFLLEQELAYEVPAVYPWTVEILR

SEQ ID NO: 230 - protein, 442 aa, Corynebacterium glutamicum
  source: /note="ncgl2002"
MTSPHSFSVTPIRTMADGTIKQIHPFTGTEVWTVPGRGNRPLSHPASTIVELSAHDHTSYCAFCSDNMLSTPPEKSRIIIDSSGDFDILPGALPGELSETTPEFRRVPNLFEIVSFDYWHQNFGFDMDSETAMRMAQYLAIPEGREHVLAIVRTRLSAAGEDPAHMTDGELLEKAPSYFAGGHDVIIGRRHFVDDATTSDQLASSGTLTVKEHEAFIRLTVDGIRDLYHRNRYAPYVVAFQNWLKPAGASFDHLHKQLVAIDERGRLVADELHHLRGNPNMYNELAVDYAGYHNLLIAENDHAVAFAGFGHRYPTIEIYSKSAIPEPWLQSDEEIQAMSNLIHACHAATGADVPCNEEWVHKPIDVDMPMPWHVMIKWRVSTLAGFEGGTKVYLNTLSPHNVRDRVVKEMYRLRDEELIASDLRIAMECSVERNSLKYNPLL

SEQ ID NO: 231 - protein, 202 aa, Corynebacterium glutamicum
  source: /note="ncgl2019"
MTVAPRIGTATRTTSESDITVEINLDGTGKVDIDTGLPFFDHMLTAFGVHGSFDLKVHAKGDIEIDAHHTVEDTAIVLGQALLDAIGDKKGIRRFASCQLPMDEALVESVVDISGRPYFVISGEPDHMITSVIGGHYATVINEHFFETLALNSRITLHVICHYGRDPHHITEAEYKAVARALRGAVEMDPRQTGIPSTKGAL

SEQ ID NO: 232 - protein, 401 aa, Corynebacterium glutamicum
  source: /note="ncgl2048"
MSQNRIRTTHVGSLPRTPELLDANIKRSNGEIGEEEFFQILQSSVDDVIKRQVDLGIDILNEGEYGHVTSGAVDFGAWWNYSFTRLGGLTMTDTDRWASQEAVRSTPGNIKLTSFSDRRDRALFSEAYEDPVSGIFTGRASVGNPEFTGPITYIGQEETQTDVDLLKKGMNAAGATDGFVAALSPGSAARLTNKFYDTDEEVVAACADALSQEYKIITDAGLTVQLDAPDLAEAWDQINPEPSVKDYLDWIGTRIDAINSAVKGLPKEQTRLHICWGSWHGPHVTDIPFGDIIGEILRAEVGGFSFEGASPRHAHEWRVWEENKLPEGSVIYPGVVSHSINAVEHPRLVADRIVQFAKLVGPENVIASTDCGLGGRLHSQIAWAKLESLVEGARIASKELF

SEQ ID NO: 233 - protein, 486 aa, Corynebacterium glutamicum
  source: /note="ncgl2077"
MTTPHLDSAQDIDLSRVHLIGIGGAGMSGVARILLARGKTVTGSDAKDSRTLLPLRAVGATIAVGHAAENLELSGELPTVVVTSFAAIPQDNPELVRAREEGIPVIRRSDLLGELLEGSTQVLIAGTHGKTSTTSMSVVAMQAAGMDPSFAIGGQLNKAGTNAHHGTGEVFIAEADESDASLLRYKPNVAVVTNVEPDHLDFFKTPEAYFQVFDDFAGRITPNGKLVVCLNDPHAAELGERSVRKGIKTVGYGTADAVQAHPEVPAMATVVDSQVVAEGTRATINIDGQEVSVILQIPGDHMVLNGAAALLAGYLVGGDVDKLVEGLSDFSGVRRRFEFHGAIEGGKFNGAAIYDDYAHHPTEVTAVLSAARTRVKAAGKGRVIVAFQPHLYSRTMEFQKEFAEALSLADAAVVLEIYGAREQPVDGVSSEIITDAMTIPVVYEPNFSAVPERIAEIAGPNDIVLTMGAGSVTMLAPEILDQLQNN

SEQ ID NO: 234 - protein, 245 aa, Corynebacterium glutamicum
  source: /note="ncgl2104"
MKNNWYRLFKYVLIGPFLRVYNRPEIEGKENIPAEGAAIMASNHEAVMDSFYFPLLCPRQLTFPAKAEYFTSPGIKGKMQKWFFTSVGQVPLDRTADNAMDSLMNTAKMVLDQGDLFGIYPEGSRSPDGRIYKGKTGMAYVAMETGKPVIPIAMIGSRDANPIGSWFPKPAKVRIKVGSPIDPLAFVKEHGLKPGTYEAARKLTDHVMFILADLTGQPYVDAYSKDVKNALEEGKGYPEGTAPSQ

SEQ ID NO: 235 - protein, 1045 aa, Corynebacterium glutamicum
  source: /note="ncgl2147"
MSGPLRSERKVVGFVRDPLPKVGSLSLKSEHAQADLEHLGWRNVESLDLLWGLSGAGDPDVALNLLIRLYQALEAIGEDARNELDQEIRQDEELRVRLFALLGGSSAVGDHLVANPLQWKLLKLDAPSREEMFQALLESVKAQPAVLEVEDFSDAHNIARDDLSTPGFYTASVTGPEAERVLKWTYRTLLTRIAAHDLAGTYPTDMRRKGGDPVPFSTVTMQLSDLADAALTAALAVAIANVYGEKPVDSALSVIAMGKCGAQELNYISDVDVVFVAEPANSKSTRTAAELIRIGSNSFFEVDAALRPEGKSGALVRSLDSHMAYYKRWAETWEFQALLKARPMTGDIDLGQSYVDALSPLIWAASQRESFVTDVQAMRRRVLDNVPEDLRDRELKLGRGGLRDVEFAVQLLQMVHGRIDETLRVRSTVNALHVLVDQGYVGREDGHNLIESYEFLRLLEHRLQLERIKRTHLLPKPDDRMNMRWLARASGFTGSMEQSSAKAMERHLRKVRLQIQSLHSQLFYRPLLNSVVNLSADAIRLSPDAAKLQLGALGYLHPSRAYEHLTALASGASRKAKIQAMLLPTLMEWLSQTAEPDAGLLNYRKLSDASYDRSWFLRMLRDEGVVGQRLMRILGNSPYISELIISTPDFVKQLGDAASGPKLLATAPTQVVKAIKATVSRHESPDRAIQAARSLRRQELARIASADLLNMLTVQEVCQSLSLVWDAVLDAALDAEIRAALNDPQKPDQPLANISVIGMGRLGGAELGYGSDADVMFVCEPVAGVEEHEAVTWSIAICDSMRSRLAQPSGDPPLEVDLGLRPEGRSGAIVRTVDSYVKYYEKWGETWEIQALLRAAWVAGDRELGIKFLESIDRFRYPVDGATQAQLREVRRIKARVDNERLPRGADRNTHTKLGRGALTDIEWTVQLLTMMHAHEIPELHNTSTLEVLEVLEKHQIINPVQVQTLREAWLTATAARNALVLVRGKRLDQLPTPGPHLAQVAGASGWDPNEYQEYLENYLKVTRKSRQVVDEVFWGVDSMEQREF

SEQ ID NO: 236 - protein, 475 aa, Corynebacterium glutamicum
  source: /note="ncgl2153"
MEQWERMKLYAAVLDFEPVAQEFGVERGFDPHIHDEAASSVDRYAQEREDLLHMPFVTIDPVGSRDLDQAVLIEEIDSGFRVHYAIADVAAFVEPGSELEKISLHRGQTIYLPDSPARLHPEELSEDAASLLEGQTRPAVVWSIDLDERGEVTATKVRRGLVKSRARLDYDQAQIDAENGRLHPSISLLPKVGQLRQESALRREAVNLSIPSQRVVKVPNDDAGEHYEIVIEPRPHIMDYNSEISLLTGMVAGEMMVKAGHGLLRTLAPATKESEATFRSEAQALGFEIAPEQPIGEFLQSVDPNTPKGMAIQREAQKLLRGSGYASVKNGDSEVHSGVGGYYAHVTAPLRRLIDRFATEHCLAIASGTDVPEWVTRVEEQVLDTMKYSSILASQVDNACLDLTEATVLKYWEGQNFNAVVVASEPEKNSARLFVYKPPVLAKCIGAPEQGTNQEVTLVTANLKKREVLFAWPAD

SEQ ID NO: 237 - protein, 81 aa, Corynebacterium glutamicum
  source: /note="ncgl2190"
MNIVLQGSFSTRQEFFDLLGAAAWGVERPAPTNLDGMVDLIRETGLDTITVKGHWLVPAEETERIEEVCDDLGVDLSFNRR

SEQ ID NO: 238 - protein, 242 aa, Corynebacterium glutamicum
  source: /note="ncgl2204"
MRRDSFRDRALVVKTYDFGEADRIIVLLTRDHGIVRGVAKGVRRSKSRFGSRLQLFVELDVQLYPGRKLSTISGADTVGYYASGIIEDFTRYSCASAILEIATHIAGLEDDPHLFEETTRALKNIQDSPEPILNLDEFMLRAMNHAGWAPSLFDCAACGRPGPHNAFHPGVGGAVCLYCRPPGSAEVPPEALHMMWLVANGQAARIPREHPEQQTTIHQLTTAHLQWHIERKLPTLAVLDQA

SEQ ID NO: 239 - protein, 382 aa, Corynebacterium glutamicum
  source: /note="ncgl2210"
MARDYYGILGVDRNATESEIKKAYRKLARKYHPDVNPGEEAAEKFREASVAHEVLTDPDKRRIVDMGGDPMEQGGGAGAGGFDGGFGGSGGLGDIFDAFFGGGAGGSRGPRSRVQPGSDTLWRTSITLEEAYKGAKKDLTLDTAVLCTKCHGSGSASDKKPVTCGTCNGAGEIQEVQRSFLGNVMTSRPCHTCDGTGEIIPDPCTECVGDGRVRARRDIVANIPAGIQSGMRIRMAGQGEVGAGGGPAGDLYIEVMVRPHAIFTRDGDDLHASIKVPMFDAALGTELDVESLTGEEVKITIPAGTQPNDVITLDGEGMPKLRAEGHGNLMAHVDLFVPTDLDDRTRELLEEIRNHRSDNASVHRESGEESGFFDKLRNKFRK

SEQ ID NO: 240 - protein, 341 aa, Corynebacterium glutamicum
  source: /note="ncgl2211"
MSATEKRRYEVLRAIVADYIASQEPVGSKSLLERHKLNVSSATIRNDMSVLESDGFIVQEHASSGRVPTEKGYRLFVDSIHDIKPLSLAERRAILGFLEGGVDLEDVLRRSVQLLSQLTHQAAVVQLPTLKTARVKHCEVVPLSPMRLLLVLITDTGRVDQRNVELEEPLAAEEVNVLRDLLNGALGEKTLTAASDALEELAQQAPTDIRDAMRRCCDVLVNTLVDQPSDRLILAGTSNLTRLSRETSASLPMVLEALEEQVVMLKLLSNVTDLDQVSVHIGGENEDIELRSATVITTGYGSQGSALGGLGVVGPTYMDYSGTISKVSAVAKYVGRVLAGE

SEQ ID NO: 241 - protein, 739 aa, Corynebacterium glutamicum
  source: /note="ncgl2247"
MTEQELLSAQTADNAGTDSTERVDAGGMQVAKVLYDFVTEAVLPRVGVDAEKFWSGFAAIARDLTPRNRELLARRDELQTLIDDYHRNNSGTIDQDAYEDFLKEIGYLVEEPEAAEIRTQNVDTEISSTAGPQLVVPILNARFALNAANARWGSLYDALYGTNAIPETDGAEKGKEYNPVRGQKVIEWGREFLDSVVPLEGASHADVEKYNITDGKLAAHVGDSVYRLKNRDSYRGFTGNFLDPEVILLETNGLHIELQIDPVHPIGKADKTGLKDIVLESAITTIMDFEDSVAAVDAEDKTLGYSNWFGLNTGELKEEMSKNGRTFTRELNKDRVYIGRNGTELVLHGRSLLFVRNVGHLMQNPSILIDDEEIFEGIMDAVLTTVCAIPGIAPQNKMRNSRKGSIYIVKPKQHGPEEVAFTNELFGRVEDLLDLPRHTLKVGVMDEERRTSVNLDASIMEVADRLAFINTGFLDRTGDEIHTSMEAGAMVRKADMQTAPWKQAYENNNVDAGIQRGLPGKAQIGKGMWAMTELMAEMLEKKIGQPREGANTAWVPSPTGATLHATHYHLVDVFKVQDELRAAGRRDSLRNILTIPTAPNTNWSEEEKKEEMDNNCQSILGYVVRWVEHGVGCSKVPDIHDIDLMEDRATLRISSQMLANWIRHDVVSKEQVLESLERMAVVVDKQNAGDEAYRDMAPNYDASLAFQAAKDLIFEGTKSPSGYTEPILHARRREFKAKN

SEQ ID NO: 242 - protein, 220 aa, Corynebacterium glutamicum
  source: /note="ncgl2250"
MYYKQLDSLVFTDGESIAKARLASMTDMWFSSDLHLGHKFVASMRGFDDPDEHDEVILSNFENTIGPDDALWLLGDLSSGAHRAEERALGLIAERLGGVVKHLVPGNHDSCHPMYRHAYKRQRRFLEVFDSVQAFQRMKWDDEDVYLSHFPRPGQDHPGMESRFDDLRLRVPLLIHGHLHSQFPMTGPGQVDVGVEAWGLKPAPRELVQLKLWESLSEKI

SEQ ID NO: 243 - protein, 369 aa, Corynebacterium glutamicum
  source: /note="ncgl2274"
MRERISNAKRVVVKIGSSSLTNDEDGHTVDPNRINTIVNALQARMEAGSDLIVVSSGAVAAGMAPLGLSTRPTELAVKQAAAAVGQVHLMHQWGRSFARYGRPIGQVLLTAADAGKRDRARNAQRTIDKLRILGAVPIVNENDTVATTGVNFGDNDRLAAIVAHLVSADALVLLSDVDGLFDKNPTDPTAKFISEVRDGNDLKGVIAGDGGKVGTGGMASKVSAARLASRSGVPVLLTSAANIGPALEDAQVGTVFHPKDNRLSAWKFWALYAADTAGKIRLDDGAVEAVTSGGKSLLAVGITEIIGDFQQGEIVEILGPAGQIIGRGEVSYDSDTLQSMVGMQTQDLPDGMQRPVVHADYLSNYASRA

SEQ ID NO: 244 - protein, 150 aa, Corynebacterium glutamicum
  source: /note="ncgl2286"
MRSAHGPYIDKFFPEPYKNMLELTKTLRKIYPDVDLPTSLIELVNVRVSQINGCGTCLSLHVPAARRAGVPEKKLDALAAWQMVDEFTVEEKAALQLAESLTLLESHEGHLAARTACSVFAEEQVAALEWAIIAINAFNRISIASGHPLL

SEQ ID NO: 245 - protein, 136 aa, Corynebacterium glutamicum
  source: /note="ncgl2287"
MTERTLILIKPDGVTNGHVGEIIARIERKGLKLAALDLRVADRETAEKHYEEHADKPFFGELVEFITSAPLIAGIVEGERAIDAWRQLAGGTDPVAKATPGTIRGDFALTVGENVVHGSDSPESAEREISIWFPNL

SEQ ID NO: 246 - protein, 259 aa, Corynebacterium glutamicum
  source: /note="ncgl2298"
MATSHRDPENIDQAGSEFTESDSGHTATPEEVVATALTFFAENGFSETKLEKIAKASGMSKRMIHYHFGDKKGLYIKAVSYALRLLRPEAEAMQLDSAVPVDGVRKIVEALYTCITKHPEAVRLLLMENLHSQDSVDSTAAYSDESNVLLNLDKLLMLGQDAGAFRPGISAEDVLVLINSLAYFRVSNKVTLKNLYSLDLESEANIEGMKRIAVDTVLAFLTSNIQNSGNSSYLVVGGKTAEPETDDSVYSFDTDVFEN

SEQ ID NO: 247 - protein, 208 aa, Corynebacterium glutamicum
  source: /note="ncgl2327"
MSNGFQMPTSRYVLPSFIEQSAYGTKETNPYAKLFEERIIFLGTQVDDTSANDIMAQLLVLEGMDPDRDITLYINSPGGSFTALMAIYDTMQYVRPDVQTVCLGQAASAAAVLLAAGAPGKRAVLPNSRVLIHQPATQGTQGQVSDLEIQAAEIERMRRLMETTLAEHTGKTAEQIRIDTDRDKILTAEEALEYGIVDQVFDYRKLKR

SEQ ID NO: 248 - protein, 167 aa, Corynebacterium glutamicum
  source: /note="ncgl2399"
MSAAEGLHIVVMGVSGCGKSSVGEALAAELGIEYKDGDELHPQENIDKMASGQALDDDDRAWWLVQVGKWLRDRPSDVIACSALKRSYRDLLRTKCPGTVFVHLHGDYDLLLSRMKAREDHFMPSTLLDSQFATLEPLEDGEDGKVFDVAHTISELAAQSAEWVRNK

SEQ ID NO: 249 - protein, 164 aa, Corynebacterium glutamicum
  source: /note="ncgl2425"
MTSENSESQDIWLTDEQQDVWLDVWTMRIGLPARLDAQLKEAAGVSHFEYFTMAQISMAPEHRVRMSELAELSDMTLSHLSRVVTRLEKAGWVKRVPDPDDGRATVAVLTDSGWEKVKATAPGHVKEVRRLVFDDLTPEELKVMGTAMKKIVNRLDMSNRLPRV

SEQ ID NO: 250 - protein, 250 aa, Corynebacterium glutamicum
  source: /note="ncgl2440"
MPPANESPMTNPLGSAPTPAKPLLDSVLDELGQDIISGKVAVGDTFKLMDIGERFGISRTVAREAMRALEQLGLVASSRRIGITVLPQEEWAVFDKSIIRWRLNDEGQREGQLQSLTELRIAIEPIAARSVALHASTAELEKIRALATEMRQLGESGQGASQRFLEADVTFHELILRYCHNEMFAALIPSISAVLVGRTELGLQPDLPAHEALDNHDKLADALLNRDADAAETASRNILNEVRSALGTLN

SEQ ID NO: 251 - protein, 211 aa, Corynebacterium glutamicum
  source: /note="ncgl2441"
MEDYLTELFRAEEWDEEPTTGKLAEVIGVTASTVSATLKKLNLEGFVNYRPYGDIELTPAGRDIAINVIRRRRIIETYLSEKLGLGAHELHGEADLFEHAVSPRVLEKMFQAVGYPTLDPHGDPIPTESGEMSINDGLMLLELKAGASATVTRVRDGNPSVVRYLTGVGITVGTTVTVVEALSDIATLRLQIGEIFQDIPLAVANAVRVSR

SEQ ID NO: 252 - protein, 277 aa, Corynebacterium glutamicum
  source: /note="ncgl2446"
MTNTQTEIINELKVSPAIDVAKEVEFRVQFLVDYLRASHTKGFVLGISGGQDSTLAGRLAQLAVERIRAEENSTDYVFYAVRLPYAIQADEDDAQVALEFIAPDKSVTVNVKGATDATEATVAAALEISELTDFNRGNIKARQRMVAQYAIAGQLGLLVIGTDHAAENVTGFFTKFGDGAADLLPLAGLSKRQGAAILEHLGAPSSTWTKVPTADLEEDRPALPDEEALGVSYADIDNYLENKPDVSEKAQQRIEHLWKVGQHKRHLPATPQENWWR

SEQ ID NO: 253 - protein, 340 aa, Corynebacterium glutamicum
  source: /note="ncgl2449"
MNPAHIFSEGPINSVVLSQDEDGNFTTSYQDTFSDPSFLGEGDVLIEVGWSSLNYKDAMALKGDKGVVRTVPLIPGIDVVGTVIESADPRFGRGDEVVLNGAGLGENRHGGFTQRLKVPSEPLLHIPFNFSAQQVGALGTAGFTAALSVNALVDQGIKPEDGEILVTGSTGGVGSIALHLLNKLGYTTVAVTGRREAHAEYLTSLGASDIIDRAELSEKGRPLQKGRWAGVVDSVGSHTLVNAIAQTKWGGIVTACGMAQGPDLPGTVLPFILRGVHLVGINSVDAPRELRRRAWALLSEHLDTAVLDDMTTVIDVKDVAQAGEDLMAGKLHGRTAVRVH

SEQ ID NO: 254 - protein, 281 aa, Corynebacterium glutamicum
  source: /note="ncgl2472"
MDTQRIKDDEDAIRSALTSLKTATGIPVTMFATVLQDNRLQITQWVGLRTPALQNLVIEPGVGVGGRVVATRRPVGVSDYTRANVISHEKDSAIQDEGLHSIVAVPVIVHREIRGVLYVGVHSAVRLGDTVIEEVTMTARTLEQNLAINSALRRNGVPDGRGSLKANRVMNGAEWEQVRSTHSKLRMLANRVTDEDLRRDLEELCDQMVTPVRIKQTTKLSARELDVLACVTLGHTNVEAAEEMGIGAETVKSYLRSVMRKLGAHTRYEAVNAARRIGALP

SEQ ID NO: 255 - protein, 318 aa, Corynebacterium glutamicum
  source: /note="ncgl2473"
MIGAPPDMGNVYNNITETIGHTPLVKLNKLTEGLDATVLVKLESFNPANSVKDRIGLAIVEDAEKSGALKPGGTIVEATSGNTGIALAMVGAARGYNVVLTMPETMSNERRVLLRAYGAEIVLTPGAAGMQGAKDKADEIVAERENAVLARQFENEANPRVHRDTTAKEILEDTDGNVDIFVASFGTGGTVTGVGQVLKENNADVQVYTVEPEASPLLTAGKAGPHKIQGIGANFIPEVLDRKVLDDVLTVSNEDAIAFSRKLATEEGILGGISTGANIKAALDLAAKPENAGKTIVTVVTDFGERYVSTVLYEDIRD

SEQ ID NO: 256 - protein, 381 aa, Corynebacterium glutamicum
  source: /note="ncgl2481"
MTLKIGPFDLASPVVLAPMAGVTNVAFRTLCREQEMQRTGTISGLYVCEMVTARALVERNEKTMHMTTFAPDENPRSLQLYTVDPKYTYEAAKMIVDENLADHIDMNFGCPVPKVTRRGGGSAIPYKRRLFENIVSAAVKATEGTDIPVTVKFRVGIDDEHHTHLDAGRIAVDAGAKSVALHARTAAQRYSGEADWNEIARLKEHLADTGIPVLGNGDIFAASDATRMMEQTGCDGVVVGRGCLGRPWLFAELSAAVRGEEIPEEPTFGEVTQIILRHAELLMQHDGETKGLRDLRKHMGWYLRGFPVGGEFRSNLAKVSTYVELEDLLAPWADSTAKAEDAEGARGRQGAPAKVALPDGWLDDPEDATVPKGAEMENSGG

SEQ ID NO: 257 - protein, 314 aa, Corynebacterium glutamicum
  source: /note="ncgl2491"
MALEPQIKSAPTPVILIVEPYGGSIRQQNPNLPMVFWDDAALTRGDGIFETLLIRDGHACNVRRHGERFKASAALLGLPEPILEDWEKATQMGIDSWYSHPNAGEASCTWTLSRGRSSTGLASGWLTITPVSSDKLAQREHGVSVMTSSRGYSIDTGLPGIGKATRGELSKVERTPAPWLTVGAKTLAYAANMAALRYAKSNGFDDVIFTDGDRVLEGATSTVVSFKGDKIRTPSPGGDILPGTTQAALFAHATEKGWRCKEKDLSIDDLFGADSVWLVSSVRGPVRVTRLDGHKLRKPDNEKEIKALITKALG

SEQ ID NO: 258 - protein, 229 aa, Corynebacterium glutamicum
  source: /note="ncgl2505"
MSGRLLVSVSSIFDQTRSAADRIISDLRADGIEVSLLVAPRIDGDWRLAKDKGTLAWMEQQRERGHELILNGFDQAVQGRRSEFANLERHEARLRLTGAIRQMQKIGFEFQIFAPPRWRMSEGTFAVLPEFDFNAAASTRGLHNLDTGEFLACRNLSVGEGFGAAKWWRKNVIKAVTRGAEKGNTVRLSASARNLTNPKVAADFREAALAALDLGAQVQTYSQAAAQLA

SEQ ID NO: 259 - protein, 295 aa, Corynebacterium glutamicum
  source: /note="ncgl2527"
MEIRWLEGFIAVAEELHFSNAAIRLGMPQSPLSQLIRRLESELGQKLFDRSTRSVELTAAGRAFLPHARGIVASAAVAREAVNAAEGEIVGVVRIGFSGVLNYSTLPILTSEVHKRLPNVELELVGQKLTREAVSLLRLGALDITLMGLPIGDPEIETRLISLEEFRVVLPKDHRLAGEGVVDLVDLAEDGFVTTPEFAGSVFRNSTFQLCAEAGFVPRISQQVNDPYMALLLVGAGVGVAITTHGTGLLAPPNTVHLPIKQHSVELRHGIAWMKGSGRVARDAVIDIALDIFKP

SEQ ID NO: 260 - protein, 485 aa, Corynebacterium glutamicum
  source: /note="ncgl2535"
MDDSNSFVVVANRLPVDMTVHPDGSYSISPSPGGLVTGLSPVLEQHRGCWVGWPGTVDVAPEPFRTDTGVLLHPVVLTASDYEGFYEGFSNATLWPLFHDLIVTPVYNTDWWHAFREVNLKFAEAVSQVAAHGATVWVQDYQLLLVPGILRQMRPDLKIGFFLHIPFPSPDLFRQLPWREEIVRGMLGADLVGFHLVQNAENFLALTQQVAGTAGSHVGQPDTLQVSGEALVREIGAHVETADGRRVSVGAFPISIDVEMFGEASKSAVLDLLKTLDEPETVFLGVDRLDYTKGILQRLLAFEELLESGALEADKAVLLQVATPSRERIDHYRVSRSQVEEAVGRINGRFGRMGRPVVHYLHRSLSKNDLQVLYTAADVMLVTPFKDGMNLVAKEFVANHRDGTGALVLSEFAGAATELTGAYLCNPFDVESIKRQMVAAVHDLKHNPESAATRMKTNSEQVYTHDVNVWANSFLDCLAQSGENS

SEQ ID NO: 261 - protein, 360 aa, Corynebacterium glutamicum
  source: /note="ncgl2538"
MIMGRKQQYGTLASIAAKLGVSRTTVSNAYNRPEQLSAELRQRILDTAEDMGYLGPDPVARSLRTRRAGAIGVLLTEDLTYAFEDMASVDFLAGVAQAAGDTQLTLIPASPASSVDHVSAQQLVNNAAVDGVVIYSVAKGDPHIDAIRARGLPAVIADQPAREEGMPFIAPNNRKAIAPAAQALIDAGHRKIGILSIRLDRANNDGEVTRERLENAQYQVQRDRVRGAMEVFIEAGIDPDTVPIMECWINNRQHNFEVAKELLETHPDLTAVLCTVDALAFGVLEYLKSVGKSAPADLSLTGFDGTHMALARDLTTVIQPNKLKGFKAGETLLKMIDKEYVEPEVELETSFHPGSTVAPI

SEQ ID NO: 262 - protein, 48 aa, Corynebacterium glutamicum
  source: /note="ncgl2559"
MDLNTQRSKLYAQLQGQLIVSVQAPDSHAMRGCCCKVGPGSKSPTSRH

SEQ ID NO: 263 - protein, 166 aa, Corynebacterium glutamicum
  source: /note="ncgl2567"
MNEFQMKQDQSPKLDSADWKILELLQVDATMPNKDIAAKVGIAPSTCLERIRRMRRNGTIVATRAHVRPSLLGRGEQAFLGIQIRPHARDTANDFVQKVLALPETLALYNVSGSEDYLVHVAVANSTELQSLIIDKLLALPQVAHCRTQLIFGEPWVAPLRQSDRQ

SEQ ID NO: 264 - protein, 160 aa, Corynebacterium glutamicum
  source: /note="ncgl2569"
MTNPIIPRVGIATDAHQIEAGKPCWIACLLFEGVDGCEGHSDGDVVAHAIVDALLSASGLGDLGSFVGVGRPEYDGVSGTQLLKEVRELLSAHGYVIGNVAAQLVGQTPKFGPRREEAQQVISDIIGAPCSLSATTTDHMGFTGRSEGRASVATAVVWKA

SEQ ID NO: 265 - protein, 366 aa, Corynebacterium glutamicum
  source: /note="ncgl2576"
MTPTTTPVSNPDALSTGTQDVHTLKGTLQRLAPGTPLRDGLDRIVRGHTGALIVIGDDENVSSICDGGFEFDVSFAATRLRELCKMDGAVILSSDLERIKRANVQLLPSPTWPTQESGTRHRSAERTALHTGVPVIAVSESQNTITLYVEGKSHMLEQPAALLNRANQALGTMERYRDRLDQVNNRLHLAELHSYVTVIDVVSVIQREEMLRRVGETIDGDVLELGKDAKEIQIQLSELRGDNDRERESIIADYLVTDGIPADEEIHTALEAISHLDDKALLNPANIARVLGLPPTEEALDEPVAPRGYRTLNRIPRVQKFLMDKLIVEFGNLDALLNASVEDLSAVDGVGSLWARHITDGLGRLS

SEQ ID NO: 266 - protein, 337 aa, Corynebacterium glutamicum
  source: /note="ncgl2587"
MTAQPAHELPRHLRFSTSGILPDNRVQMWESHNARALLPLDIRTIDDRPMQASETNLHLPSMRMASVFGTSQFVERSESFISENPTGVVAIFFATEGEAVFFHRGGHIALRPGQAIVYDADRPFLRGFNNRFRELVLTIPKQRYLEIVGTKGPELPAIFEFGATGTATEQALARLVQESLHRIERGEPEHIDSSGPLGKPWSDIENEAQGLIRNVLGDATSSEEGLISAAQRFIDINISDSGLQASRIAAAVRISERQLSRIFSESGQTIGRYVLNTRLDFAKEALSTPERDKVSVSEIGKRFGFASPSHFSRTFRERFEMTPLQWRKESQRQSFQE

SEQ ID NO: 267 - protein, 76 aa, Corynebacterium glutamicum
  source: /note="ncgl2614"
MDIVSSIFAPILGPMAGVGILKGLLAVAAAAHSVDTTSTTYQILYAAGDAFSCSWQSFWRLLRLVNLVPMSLHQSH

SEQ ID NO: 268 - protein, 429 aa, Corynebacterium glutamicum
  source: /note="ncgl2669"
MAAIVIVGAQWGDEGKGKATDILGGLVDYVVKPNGGNNAGHTVVVGGEKYELKLLPAGVLSETATPILGNGVVINLEALFEEIDGLEARGADASRLRISANAHLVAPYHQVMDRVQERFLGKRAIGTTGRGIGPTYADKVSRVGIRVQDIFDESILRQKVESALDYKNQVLVKMYNRKAIVAEEIVQYFLSYADRLRPMVIDATLVLNEALDQGKHVLMEGGQATMLDVDHGTYPFVTSSNPTAGGASVGSGIGPTKITSSLGIIKAYTTRVGAGPFPTELFDKWGEYLQTVGGEVGVNTGRKRRCGWYDSVIARYASRVNGFTDYFLTKLDVLTGIGEIPICVAYDVDGVRHDEMPLTQSEFHHATPIFETMPAWDEDITDCKTFEDLPQKAQDYVRRLEELSGARFSYIGVGPGRDQTIVLHDVLEG

SEQ ID NO: 269 - protein, 129 aa, Corynebacterium glutamicum
  source: /note="ncgl2684"
MCNNLRMNADKKMCGMNPDSQYVELAVEVFGLLADATRVRIILALRNSGELSVNHLADIVDKSPAAVSQHLARLRMARIVSTRQEGQRVFYKLTNEHASQLVSDAIFQAEHTIADGQTPPHHHREREQS

SEQ ID NO: 270 - protein, 146 aa, Corynebacterium glutamicum
  source: /note="ncgl2699"
MASTPKESNDEGQFDRVDFQGEVFVISVAAELAGMHAQTLRTYDRMGLVTPIRTRGGGRRYSRADVELLREIQHLSQEEGVNLAGIKAIIELGEENRNLKESLRKVTAENEQLKDQLRSGRPRGELVHVPRSTAVVMWERRKGRSK

SEQ ID NO: 271 - protein, 618 aa, Corynebacterium glutamicum
  source: /note="ncgl2702"
MGRAVGIDLGTTNSVVSVLEGGEPVVIANAEGSRTTPSVVAFAKNGEVLVGQSAKNQAVTNVDRTIRSVKRHIGTDWSVAIDDKNYTSQEISARTLMKLKRDAEAYLGEDVTDAVITVPAYFEDSQRQATKEAGQIAGLNVLRIVNEPTAAALAYGLEKGEQEQTILVFDLGGGTFDVSLLEIGDGVVEVRATSGDNELGGDDWDQRIVDWLVEKFQSSNGIDLTKDKMALQRLREAAEKAKIELSSSQSANINLPYITVDADKNPLFLDETLSRAEFQRITQDLLARTKTPFNQVVKDAGVSVSEIDHVVLVGGSTRMPAVTELVKELTGGREPNKGVNPDEVVAVGAALQAGVLRGEVKDVLLLDVTPLSLGIETKGGVMTKLIERNTTIPTKRSETFTTAEDNQPSVQIQVFQGEREIATANKLLGSFELGGIAPAPRGVPQIEVTFDIDANGIVHVTAKDKGTGKENTITIQDGSGLSQDEIDRMIKDAEAHADEDKKRREEQEVRNNAESLVYQTRKFVEENSEKVSEDLKAKVEEAAKGVEEALKGEDLEAIKAAVEKLNTESQEMGKAIYEADAAAGATQADAGAEGAADDDVVDAEVVEDDAADNGEDKK

SEQ ID NO: 272 - protein, 148 aa, Corynebacterium glutamicum
  source: /note="ncgl2755"
MTDKTMLVAFDGSPESRRALEYAAKLLQPRTVEILTAWEPLHRQAARSVSLITLGVEPEDPAHSAALKTCQEGVELAQSLGLEARAHMVESATAVWSAIVDAADELRPDVIVTGTRGISGWKSLWQSSTSDSVLHHADVPVFVVPPLD

SEQ ID NO: 273 - protein, 710 aa, Corynebacterium glutamicum
  source: /note="ncgl2789"
MLAIILTAVLGASGLAAAGTQYLNTQGEGIGPVAVQNDSESFNSGTNVVVEDAAVTAQGEGGGARTVKEFQRDQQFSSFALTWTGKKDITAFVRAEQEDGTWSQWYDLEPMVNEDQGTNGTELIWHGPTNKIQVSTLNVDLFGADAAAADENGQDIPAVDAAEAAPAAEPAPAEAPVEEAPAPVAEPAPAAEPIAEPVADYSANDGLAPLPSNYGDIQPVADVDDGLNAVFIDGNADAGVGIANVADTDGMPKVISRAGWGANESLRCSNPTIDKDGVSAITIHHTAGSNNYTEAQAAAQVRGAYSYHAQTLGWCDIGYQSLVDKYGNIYEGRAGGMTNAVQGAHAGGFNQNTWAISMIGDYSYNAPPQETINAVGELAGWRAKVAGFDPTGTDTHYSEGTSYSKVPYGQSVNLPNIFAHRDVGYTACPGDAGYAQMGNIRQIAKAKYDSLQSGNTGGTTTAASTPKETSTSNAPSTTTPATTPKETSTSNAPSTTTAQPVTPAEPQQYSESDALAALLTGGSSGGTDLLNGANSEQLLTGLGSIAAVLIAASLADGGLNGLISNVGSNNGVPVLGDIKITDVIPIVDTVINLTGENKYSRGWNDLNNTLGPVLGAATGGETTVKYTSDQNSEVTFVPFENGIMVSSPEAGTHGLWGAIGDAWAQQGADLGPLGLPTSNQYQSGDLLRVDFQNGYITYDSATGQASIQLN

SEQ ID NO: 274 - protein, 509 aa, Corynebacterium glutamicum
  source: /note="ncgl2790"
MRISKANAYVAAIDQGTTSTRCILIDAQGKVVSSASKEHRQIFPQQGWVEHDPEEIWDNIRSVVSQAMVSIDITPHEVASLGVTNQRETTVVWDKHTGEPVYNAIVWQDTRTSDICLEIAGEEGQEKWLDRTGLLINSYPSGPKIKWILDNVEGARERAEKGDLLFGTMDTWVLWNLTGGVRGDDGDDAIHVTDVTNASRTLLMDLRTQQWDPELCEALDIPMSMLPEIRPSVGEFRSVRHRGTLADVPITGVLGDQQAALFGQGGFHEGAAKNTYGTGLFLLMNTGTSLKISEHGLLSTIAYQREGSAPVYALEGSVSMGGSLVQWLRDNLQIIPNAPAIENLAREVEDNGGVHVVPAFTGLFAPRWRPDARGVITGLTRFANRKHIARAVLEANAFQTREVVEAMAKDAGKALESLRVDGAMVENDLLMQMQADFLGIDVQRLEDVETTAVGVAFAAGLGSGFFKTTDEIEKLIAVKKVWNPDMSEEERERRYAEWNRAVEHSYDQA

SEQ ID NO: 275 - protein, 345 aa, Corynebacterium glutamicum
  source: /note="ncgl2802"
MPPRQTPPRQVPPQQQYQQPGQIGHLRPQPPVITNGGGRRRKAISFKPRGCLGSLAGLVAVVLVLAFVVALWADAKLNRVDATPATQVANTAGTNWLLVGSDSRQGLSDEDIERLGTGGDIGVGRTDTIMVLHMPRTGEPTLLSIPRDSYVNVPGWGMDKANAAFTVGGPQLLTQTVEEATGLRIDHYAEIGMGGLANMVDAVGGVEMCPAEPMYDPLANLDIQAGCQEFDGATALGYVRTRATSLGDLDRVVRQREFFSALLSTATSPGTLLNPFRTFPMISNAVGTFTVGEGDHVWHLARLALAMRGGIVTETVPIASFADYDVGNVAIWDEAGAEALFSSMR

SEQ ID NO: 276 - protein, 308 aa, Corynebacterium glutamicum
  source: /note="ncgl2827"
MDNDGGDMRIDDLRSFISVAQSGHLTETAERLGIPQPTLSRRISRVEKHAGTTLFDRAGRKLVLNQRGHAFLNHASAIVAEFNSAATEIKRLMDPEKGTIRLDFMHSLGTWMVPELIRTFRAEHPNVEFQLHQAAAMLLVDRVLADETDLALVGPKPAEVGTSLGWAPLLRQRLALAVPADHRLASFSGQGELPLISATEEPFVAMRAGFGTRLLMDALAEEAGFVPNVVFESMELTTVAGLVSAGLGVGVVPMDDPYLPTVGIVQRPLSPPAYRELGLVWRLNAGPAPAVDNFRKFVAGSRYALEEG

SEQ ID NO: 277 - protein, 157 aa, Corynebacterium glutamicum
  source: /note="ncgl2886"
MLAGMPNLNAEELAVRVRPALTKLYVLYFRRSVNSDLSGPQLTILSRLEENGPSRISRIAELEDIRMPTASNALHQLEQLNLVERIRDTKDRRGVQVQLTDHGREELERVNNERNAEMARLLEMLTPEQLERTEDLVDIITELAEVYGSWKETDSGS

SEQ ID NO: 278 - protein, 271 aa, Corynebacterium glutamicum
  source: /note="ncgl2898"
MIMPEGHVIHRLAGELTKNFGDTILDATSPQGRFASEAAIINGHRIAVAEAYGKHLFVEFDADHPEHILYIHLGLIGTLQFEPAEETRGQIRLHLSDGEIAANLRGPQWCRLITDAEHTQAIGKLGADPIRDDADPEPIRIKVQRSGRSIGSLLMDQKLFAGVGNIYRAETLFRLGISPFTIGKDITTAQFRSIWADLVGLMKDGVVAGRIDTVRPEHTPEAMGRPPRKDDHGGEVYTYRRTGQECFLCATPIKEQVMEGRNLFWCPGCQR

SEQ ID NO: 279 - protein, 158 aa, Corynebacterium glutamicum
  source: /note="ncgl2901"
MHHLRYDSPIGELLLVASDQGLTYVAFSDENYAACTVGSTPGTNAVLEQAVSELKEYFAGKRKEFSTPLDWPSQNLLSFRGKVQEFLLSIPYGESKTYKQIAAELNNAGAVRAVGSACATNPLPIFAPCHRVLRTDGALGGYRGGLEAKQWLLKLEHP

SEQ ID NO: 280 - protein, 494 aa, Corynebacterium glutamicum
  source: /note="ncgl2905"
MGSIPTMSIPFDDSRGPYVLAMDIGSTASRGGLYDASGCPIKGTKQRESHEFTTGEGVSTIDADQVVSEITSVINGVLNAADHHNIKDQIAAVALDSFASSLILVDGEGNALTPCITYADSRSAQYVEQLRADIDEEAYHGRTGVRLHTSYHPSRLLWLKTEFEEEFNKAKYVMTIGEYVYFKLAGLTGMATSIAAWSGILDAHTGELDLTILEHIGVDPALFGEIRNPDEPATDAKVVDKKWKHLEEIPWFHAIPDGWPSNIGPGAVDSKTVAVAVATSGAMRVILPSVPEQIPSGLWCYRVSRDQCIVGGALNDVGRAVTWLERTIIKPENLDEVLICEPLEGTPAVLPFFSGERSIGWAASAQATITNIQEQTGPEHLWRGVFEALALSYQRVWEHMEKAGAAPERVIASGRVSTDHPEFLAMLSDALDTPVIPLEMKRATLRGTALIVLEQLEPGGTRATPPFGTTHQPRFAHYYSKARELFDALYLKLV

SEQ ID NO: 281 - protein, 258 aa, Corynebacterium glutamicum
  source: /note="ncgl2921"
MDNVAPTQGLPPKEFLSSVDIALQLILLLRDSGSLTISGAAETLGVGASTIHRSMSMLVYRGFAVRSESRTYLPGSALATSALQPGLGADLTKKCSHYMESIGKETGETTHLVILQGDSVHFIHSVEGSLPVRVGNRRGQVMPAIQNSGGLVMLAEMSARELRALYSSLGDEEFENLRKRLRRTRDRGHGANFGFFEQDVSAVAEPLLNDVGDVLGAITVAVPSNRFREVYPKAVQVLERHMRDLNKALADYRVPEKG

SEQ ID NO: 282 - protein, 348 aa, Corynebacterium glutamicum
  source: /note="ncgl2929"
MTSPATLKVLNAYLDNPTPTLEEAIEVFTPLTVGEYDDVHIAALLATIRTRGEQFADIAGAAKAFLAAARPFPITGAGLLDSAGTGGDGANTINITTGASLIAASGGVKLAKHGNRSVSSKSGSADVLEALNIPLGLDVDRAVKWFEASNFTFLFAPAYNPAIAHVQPVRQALKFPTIFNTLGPLLSPARPERQIMGVANANHGQLIAEVFRELGRTRALVVHGAGTDEIAVHGTTLVWELKEDGTIEHYTIEPEDLGLGRYTLEDLVGGLGTENAEAMRATFAGTGPDAHRDALAASAGAMFYLNGDVDSLKDGAQKALSLLADGTTQAWLAKHEEIDYSEKESSND

SEQ ID NO: 283 - protein, 474 aa, Corynebacterium glutamicum
  source: /note="ncgl2930"
MTSNNLPTVLESIVEGRRGHLEEIRARIAHVDVDALPKSTRSLFDSLNQGRGGARFIMECKSASPSLGMIREHYQPGEIARVYSRYASGISVLCEPDRFGGDYDHLATVAATSHLPVLCKDFIIDPVQVHAARYFGADAILLMLSVLDDEEYAALAAEAARFDLDILTEVIDEEEVARAIKLGAKIFGVNHRNLHDLSIDLDRSRRLSKLIPADAVLVSESGVRDTETVRQLGGHSNAFLVGSQLTSQENVDLAARELVYGPNKVCGLTSPSAAQTARAAGAVYGGLIFEEASPRNVSRETSQKIIAAEPNLRYVAVSRRTSGYKDLLVDGIFAVQIHAPLQGSVEAEKALIAAVREEVGPQVQVWRAISMSSPLGAEVAAAVEGDVDKLILDAHEGGSGEVFDWATVPAAVKAKSLLAGGISPDNAAQALAVGCAGLDINSGVEYPAGAGTWAGAKDAGALLKIFATISTFHY

SEQ ID NO: 284 - protein, 417 aa, Corynebacterium glutamicum
  source: /note="ncgl2931"
MTEKENLGGSTLLPAYFGEFGGQFVAESLLPALDQLEKAFVDATNSPEFREELGGYLRDYLGRPTPLTECSNLPLAGEGKGFARIFLKREDLVHGGAHKTNQVIGQVLLAKRMGKTRIIAETGAGQHGTATALACALMGLECVVYMGAKDVARQQPNVYRMQLHGAKVIPVESGSGTLKDAVNEALRDWTATFHESHYLLGTAAGPHPFPTIVREFHKVISEEAKAQMLERTGKLPDVVVACVGGGSNAIGMFADFIDDEGVELVGAEPAGEGLDSGKHGATITNGQIGILHGTRSYLMRNSDGQVEESYSISAGLDYPGVGPQHAHLHATGRATYVGITDAEALQAFQYLARYEGIIPALESSHAFAYALKRAKTAEEEGQNLTILVSLSGRGDKDVDHVRRTLEENPELILKDNR

SEQ ID NO: 285 - protein, 1114 aa, Corynebacterium glutamicum
  source: /note="ncgl2982"
MNGQQVSSSLSNNSEQSGLRGRIVAPAPPAPVPEARKKAVARTDGDRSSLKNSPTASATQAAQTRLAEPEPKKHTSDSDVVRSTGSMAIATLLSRITGFLRTVMIGAALSPAIASAFNTANTLPNLITEIVLGAVLTSLVIPVLTRAEKEDADGGSGFFRRLLTLSVTLLGGVTILSIIGAPLLTRMMLSSEGQVNVVMSTAFAYWLLPQIFFYGLFALFMAVLNTREVFKPGAWAPVVNNVITLTVLGVYMVLPARLHPHEQVGIFDPQIIFLGVGTTLGVVAQCLIMIPYLRRAGIDMRPLWGIDARLKQFGGMAMAIIVYVAISQFGYIITTRIASIADDAAPFIYQQHWMLLQVPYGIIGVTLLTAIMPRLSRNAADGDDRAVVSDLQLGSKLTFIALIPIVVFFTAFGVPIANGLFAYGQFDANAANILGWTLSFSAFTLIPYALVLLHLRVFYAREEVWTPTFIIAGITATKVVLSLLAPLLSSSPERVVVLLGAANGFSFITGAVIGAYLLRKKLGLLGMRSLAKTSLWALGSAAVGAAAAWALGWLIQAVVGDFLLGTLSSVGYLLYLAVLGVFFIIITGIVLSRSGLPEVQNLGQALTRIPGMSRFIRPNTKISLDVGEVSQQDFSTQLVAPSEFSATPVPPPMSAGIVRGPRLVPGAPVGDGRFRLLADHGGVQGARFWQAREIATGKEVALIFVDTSGNAPFAPLSSAAAAGIAYEVQRRTKKLASLGSLAVAPNIYSEAYRNGCLIVADWVPGSSLSAVAESGADPRAAAFALAELTETIGEAHEMGIPAGLDNKCRIRINTDGHAVLAFPAILPDASELRDAKSLASAAEMLIDATLAPSDVKAMVTEAQGLATEDNPDYASLAMAMRTCGLFTEEPTHLVVKKEKTPKPATRDGFGASDYTVKGMAAIAAVVIILVSLVAAGTAFLTSFFGSSTNEQSPLASVEATTSATPEPVGPPVYLDLDQARTWDDGAGTDVTDVTDGNTSTAWTSTGGDGLLVDLSTPARLDRVILTTGTGSDSNVTSTVKIYAFNDASPHSLSEGIEIGTVDYSGRSLSHSIRDSSKLPGQVESMVILVDEVHSSQTSDTNPQMQIAEVQLVGW

SEQ ID NO: 286 - protein, 317 aa, Corynebacterium glutamicum
  source: /note="ncgl2984"
MSEEQSAVAPKIHDVAIIGSGPAGYTAAVYAARADLNPIMFEGYEYGGSLMTTTDVENFPGFEKGILGPELMENMRAQAERFGTDMHMELVDRVDLTGDIKKLWVGDDEYHARAVILSMGSAPRYLGVKGEQELLGRGVSACATCDGFFFRDQDIAVIGGGDSAMEEATFLTKFARSVTIVHRREEFRASAIMLERAQKNEKIRFVTNKTVEEVIEADGKVSGLKLNDTVTGEDSVLDVTAMFVAIGHDPRSEILAGQVEVDPSNYVLVQEPSTRTNLDGVFAAGDLVDSHYQQAITAAGSGCRAAIDAEHYLASLA

What is claimed is:

1. A host cell comprising a promoter polynucleotide sequence selected from the group consisting of SEQ ID NOs: 1 to 8 that is functionally linked to at least one heterologous ancillary target gene.

2. A host cell comprising:
a. a first promoter polynucleotide sequence that is functionally linked to at least one first heterologous target gene, wherein said at least one first heterologous target gene is a component of a biosynthetic pathway for producing a target biomolecule, wherein the target biomolecule is selected from the group consisting of amino acids, organic acids, proteins and polymers; and
b. a second promoter polynucleotide sequence selected from the group consisting of SEQ ID NOs: 1 to 8 that is functionally linked to at least one second heterologous target gene, wherein said at least one second heterologous target gene is an ancillary target gene.

3. The host cell according to claim 1, wherein said second promoter polynucleotide sequence is selected from the group consisting of SEQ ID NOs:1, 5 and 7.

4. The host cell according to any one of claims 1-3, wherein said ancillary target gene is a gene that is classified under GOslim term GO:0003674; GO:0003677; GO:0008150; GO:0034641; or GO:0009058.

5. The host cell according to claim 4, wherein said ancillary target gene is a gene that is classified under, or under at least, 2, 3, 4, or 5 of the following GOslim terms: GO:0003674; GO:0003677; GO:0008150; GO:0034641; and GO:0009058.

6. The host cell according to any one of claims 1-5, wherein said host cell is isolated.

7. The host cell according to any one of claims 1-6, wherein said ancillary target gene is not a component of a biosynthesis pathway comprising genes of one or more, or all, of the following KEGG entries: M00016; M00525; M00526; M00527; M00030; M00433 M00031; M00020; M00018; M00021; M00338; M00609; M00017; M00019; M00535; M00570; M00432; M00015; M00028; M00763; M00026; M00022; M00023; M00024; M00025; and M00040.

8. The host cell according to any one of claims 1-6, wherein said ancillary target gene is not asd, ask, aspB, cg0931, dapA, dapB, dapD, dapE, dapF, ddh, fbp, hom, icd, lysA, lysE, odx, pck, pgi, ppc, ptsG, pyc, tkt, or zwf, or an endogenous functional ortholog thereof in the host cell.

9. The host cell according to any one of claims 1-6, wherein said ancillary target gene is selected from the genes of one or more, or all, of the following KEGG entries: M00010, M00002, M00007, M00580, or M00005.

10. The host cell according to claim 2, wherein said at least one first heterologous target gene is a gene that is a component of an amino acid biosynthetic pathway.

11. The host cell according to claim 10, wherein said amino acid biosynthetic pathway is selected from the group consisting of:
the lysine biosynthesis pathway comprising genes of entry M00016 of the Kyoto Encyclopedia of Genes and Genomes (KEGG);
the lysine biosynthesis pathway comprising genes of KEGG entry M00525;
the lysine biosynthesis pathway comprising genes of KEGG entry M00526;
the lysine biosynthesis pathway comprising genes of KEGG entry M00527;
the lysine biosynthesis pathway comprising genes of KEGG entry M00030;
the lysine biosynthesis pathway comprising genes of KEGG entry M00433; and
the lysine biosynthesis pathway comprising genes of KEGG entry M00031.

12. The host cell according to claim 10, wherein said amino acid biosynthetic pathway is selected from the group consisting of the serine biosynthesis pathway comprising genes of KEGG entry M00020.

13. The host cell according to claim 10, wherein said amino acid biosynthetic pathway is selected from the group consisting of the threonine biosynthesis pathway comprising genes of KEGG entry M00018.

14. The host cell according to claim 10, wherein said amino acid biosynthetic pathway is selected from the group consisting of:
the cysteine biosynthesis pathway comprising genes of KEGG entry M00021;
the cysteine biosynthesis pathway comprising genes of KEGG entry M00338; and/or
the cysteine biosynthesis pathway comprising genes of KEGG entry M00609.

15. The host cell according to claim 10, wherein said amino acid biosynthetic pathway is selected from the group consisting of the methionine biosynthesis pathway comprising genes of KEGG entry M00017.

16. The host cell according to claim 10, wherein said amino acid biosynthetic pathway is selected from the group consisting of the valine/isoleucine biosynthesis pathway comprising genes of KEGG entry M00019.

17. The host cell according to claim 10, wherein said amino acid biosynthetic pathway is selected from the group consisting of:
the isoleucine biosynthesis pathway comprising genes of KEGG entry M00535; and/or
the isoleucine biosynthesis pathway comprising genes of KEGG entry M00570.

18. The host cell according to claim 10, wherein said amino acid biosynthetic pathway is selected from the group consisting of the leucine biosynthesis pathway comprising genes of KEGG entry M00432.

19. The host cell according to claim 10, wherein said amino acid biosynthetic pathway is selected from the group consisting of the proline biosynthesis pathway comprising genes of KEGG entry M00015.

20. The host cell according to claim 10, wherein said amino acid biosynthetic pathway is selected from the group consisting of:
the ornithine biosynthesis pathway comprising genes of KEGG entry M00028; and
the ornithine biosynthesis pathway comprising genes of KEGG entry M00763.

21. The host cell according to claim 10, wherein said amino acid biosynthetic pathway is selected from the group consisting of the histidine biosynthesis pathway comprising genes of KEGG entry M00026.

22. The host cell according to claim 10, wherein said amino acid biosynthetic pathway is selected from the group consisting of:
the shikimate biosynthesis pathway comprising genes of KEGG entry M00022;
the tryptophan biosynthesis pathway comprising genes of entry M00023;
the phenylalanine biosynthesis pathway comprising genes of KEGG entry M00024;
the tyrosine biosynthesis pathway comprising genes of KEGG entry M00025; and
the tyrosine biosynthesis pathway comprising genes of KEGG entry M00040.

23. The host cell of any one of claims 2-22, further comprising one or more additional second promoter polynucleotide sequences selected from the group consisting of SEQ ID NOs:1 to 8, each additional second promoter polynucleotide sequence functionally linked to at least one additional second heterologous target gene, wherein said at least one additional second heterologous target gene is an ancillary target gene.

24. The host cell according to claim 23, wherein said at least one second heterologous target gene and said at least one additional second heterologous target gene are part of the same metabolic pathway.

25. The host cell according to claim 24, wherein said at least one second heterologous target gene and said at least one additional second heterologous target gene are not part of the same metabolic pathway.

26. The host cell of any one of claims 2-22, further comprising one or more additional first promoter polynucleotide sequences selected from the group consisting of SEQ ID NOs:1 to 8, each additional first promoter polynucleotide sequence functionally linked to at least one additional first heterologous target gene, wherein the at least one first heterologous target gene and the at least one additional first heterologous target gene are in the same metabolic pathway.

27. The host cell according to any one of claims 1 to 26, which belongs to the genus Corynebacterium.

28. The host cell according to claim 27, which is Corynebacterium glutamicum.

29. The host cell according to any one of claims 1-28, wherein the ancillary target gene encodes an amino acid sequence selected from SEQ ID NOs:148-286.

30. The host cell according to any one of claims 1-29, wherein the ancillary target gene has a nucleotide sequence selected from SEQ ID NOs:9-147.

31. A method of producing a target biomolecule comprising culturing a host cell according to any one of claims 1 to 30 under conditions suitable for producing the biomolecule.

32. The method according to claim 31, wherein said biomolecule is an L-amino acid.

33. The method according to claim 32, wherein said L-amino acid is L-lysine.

34. A plurality of host cells comprising:
a. a first host cell comprising a first promoter polynucleotide sequence selected from a group of promoters comprising a plurality of promoters with incrementally increasing levels of promoter activity, wherein the first promoter polynucleotide is operably linked to a heterologous target gene, wherein the heterologous target gene is selected from genes within a pathway for production of a target biomolecule and heterologous ancillary target genes that are off the pathway for production of the target biomolecule;
b. a second host cell comprising a second promoter polynucleotide sequence selected from the group of promoters comprising the plurality of promoters with incrementally increasing levels of promoter activity, wherein the second promoter polynucleotide is functionally linked to a heterologous ancillary target gene, wherein the first and second promoter polynucleotide are different.

35. The plurality of host cells according to claim 34, wherein said plurality of host cells comprises at least 1×10⁶ cells.

36. The plurality of host cells according to claim 34 or 35, wherein said group of promoters comprising the plurality of promoters with incrementally increasing levels of promoter activity are constitutive promoters.

37. The plurality of host cells according to claim 34 or 35, wherein said group of promoters comprising the plurality of promoters with incrementally increasing levels of promoter activity are inducible promoters.

38. The plurality of host cells according to any one of claims 34-37, wherein said heterologous ancillary target gene operably linked to the second promoter polynucleotide is a shell 3 or shell 4 target gene; and/or wherein said first promoter polynucleotide is operably linked to a shell 3 or 4 heterolgous ancillary target gene.

39. The plurality of host cells according to any one of claims 34-38, wherein said heterologous ancillary target gene operably linked to said first and/or second promoter polynucleotide is not a component of a biosynthesis pathway comprising genes of one or more, or all, of the following KEGG entries: M00016; M00525; M00526; M00527; M00030; M00433 M00031; M00020; M00018; M00021; M00338; M00609; M00017; M00019; M00535; M00570; M00432; M00015; M00028; M00763; M00026; M00022; M00023; M00024; M00025; and M00040.

40. The plurality of host cells according to any one of claims 34-38, wherein said heterologous ancillary target gene operably linked to said first and/or second promoter polynucleotide is not asd, ask, aspB, cg0931, dapA, dapB, dapD, dapE, dapF, ddh, fbp, hom, icd, lysA, lysE, odx, pck, pgi, ppc, ptsG, pyc, tkt, or zwf, or an endogenous functional ortholog thereof in the host cell.

41. The plurality of host cells according to any one of claims 34-38, wherein said heterologous ancillary target gene operably linked to said first and/or second promoter polynucleotide is selected from the genes of one or more, or all, of the following KEGG entries: M00010, M00002, M00007, M00580, or M00005.

42. The plurality of host cells according to any one of claims 34-41, wherein said heterologous ancillary target gene operably linked to said first and/or second promoter polynucleotide is a gene classified under GOslim term GO:0003674; GO:003677; GO:0008150; GO:0034641; or GO:009058.

43. The plurality of host cells according to claim 42, wherein said heterologous ancillary target gene operably linked to said first and/or second promoter polynucleotide is a gene classified under, or under at least, 2, 3, 4, or 5 of the following GOslim terms GO:0003674; GO:003677; GO:0008150; GO:0034641; GO:009058.

44. The plurality of host cells according to claim 34-37, wherein said first promoter polynucleotide is operably linked to an on-pathway heterologous target gene for production of a target biomolecule, such as a heterologous target gene in shell 1 of a biosynthetic pathway for production of the target biomolecule.

45. The plurality of host cells according to claim 34-37, wherein said first promoter polynucleotide is operably linked to a heterologous shell 2 target gene.

46. The plurality of host cells according to any one of claims 34-45, wherein said pathway for production of target biomolecule is an amino acid biosynthetic pathway.

47. The plurality of host cells according to claim 46, wherein the amino acid biosynthetic pathway is selected from the group consisting of:
the lysine biosynthesis pathway comprising genes of entry M00016 of the Kyoto Encyclopedia of Genes and Genomes (KEGG);
the lysine biosynthesis pathway comprising genes of KEGG entry M00525;
the lysine biosynthesis pathway comprising genes of KEGG entry M00526;
the lysine biosynthesis pathway comprising genes of KEGG entry M00527;
the lysine biosynthesis pathway comprising genes of KEGG entry M00030;
the lysine biosynthesis pathway comprising genes of KEGG entry M00433; and
the lysine biosynthesis pathway comprising genes of KEGG entry M00031.

48. The plurality of host cells according to claim 46, wherein said amino acid biosynthetic pathway is selected from the group consisting of the serine biosynthesis pathway comprising genes of KEGG entry M00020.

49. The plurality of host cells according to claim 46, wherein said amino acid biosynthetic pathway is selected from the group consisting of the threonine biosynthesis pathway comprising genes of KEGG entry M00018.

50. The plurality of host cells according to claim 46, wherein said amino acid biosynthetic pathway is selected from the group consisting of:
the cysteine biosynthesis pathway comprising genes of KEGG entry M00021;
the cysteine biosynthesis pathway comprising genes of KEGG entry M00338; and/or the cysteine biosynthesis pathway comprising genes of KEGG entry M00609.

51. The plurality of host cells according to claim 46, wherein said amino acid biosynthetic pathway is selected from the group consisting of the methionine biosynthesis pathway comprising genes of KEGG entry M00017.

52. The plurality of host cells according to claim 46, wherein said amino acid biosynthetic pathway is selected from the group consisting of the valine/isoleucine biosynthesis pathway comprising genes of KEGG entry M00019.

53. The plurality of host cells according to claim 46, wherein said amino acid biosynthetic pathway is selected from the group consisting of:
a. the isoleucine biosynthesis pathway comprising genes of KEGG entry M00535; and/or
b. the isoleucine biosynthesis pathway comprising genes of KEGG entry M00570.

54. The plurality of host cells according to claim 46, wherein said amino acid biosynthetic pathway is selected from the group consisting of the leucine biosynthesis pathway comprising genes of KEGG entry M00432.

55. The plurality of host cells according to claim 46, wherein said amino acid biosynthetic pathway is selected from the group consisting of the proline biosynthesis pathway comprising genes of KEGG entry M00015.

56. The plurality of host cells according to claim 46, wherein said amino acid biosynthetic pathway is selected from the group consisting of:
a. the ornithine biosynthesis pathway comprising genes of KEGG entry M00028; and
b. the ornithine biosynthesis pathway comprising genes of KEGG entry M00763.

57. The plurality of host cells according to claim 46, wherein said amino acid biosynthetic pathway is selected from the group consisting of the histidine biosynthesis pathway comprising genes of KEGG entry M00026.

58. The plurality of host cells according to claim 46, wherein said amino acid biosynthetic pathway is selected from the group consisting of:
the shikimate biosynthesis pathway comprising genes of KEGG entry M00022;
the tryptophan biosynthesis pathway comprising genes of entry M00023;
the phenylalanine biosynthesis pathway comprising genes of KEGG entry M00024;
the tyrosine biosynthesis pathway comprising genes of KEGG entry M00025; and
the tyrosine biosynthesis pathway comprising genes of KEGG entry M00040.

59. The plurality of host cells according to any one of claims 34-58, wherein the first promoter polynucleotide and the second promoter polynucleotide are operably linked to the same heterologous ancillary target gene sequence.

60. The plurality of host cells according to any one of claims 34-59, wherein the plurality further comprises a third host cell comprising a third promoter polynucleotide sequence selected from the group of promoters comprising the plurality of promoters with incrementally increasing levels of promoter activity, wherein the third promoter is functionally linked to a heterologous target gene, and wherein the first, second, and third promoter are different.

61. The plurality of host cells according to claim 60, wherein the first, second, and third, promoter are operably linked to the same heterologous ancillary target gene.

62. The plurality of host cells according to claim 60 or 61, wherein the plurality further comprises a fourth host cell comprising a fourth promoter polynucleotide sequence selected from the group of promoters comprising the plurality of promoters with incrementally increasing levels of promoter activity, wherein the fourth promoter is functionally linked to a heterologous target gene, and wherein the first, second, third, and fourth promoter are different.

63. The plurality of host cells according to claim 62, wherein the first, second, third, and fourth promoter are operably linked to the same heterologous ancillary target gene.

64. The plurality of host cells according to claim 62 or 63, wherein the plurality further comprises a fifth host cell comprising a fifth promoter polynucleotide sequence selected from the group of promoters comprising the plurality of promoters with incrementally increasing levels of promoter activity, wherein the fifth promoter is functionally linked to a heterologous target gene, and wherein the first, second, third, fourth, and fifth promoter are different.

65. The plurality of host cells according to claim 64, wherein the first, second, third, fourth, and fifth promoter are operably linked to the same heterologous ancillary target gene.

66. The plurality of host cells according to claim 64 or 65, wherein the plurality further comprises a sixth host cell comprising a sixth promoter polynucleotide sequence selected from the group of promoters comprising the plurality of promoters with incrementally increasing levels of promoter activity, wherein the sixth promoter is functionally linked to a heterologous target gene, and wherein the first, second, third, fourth, fifth, and sixth promoter are different.

67. The plurality of host cells according to claim 66, wherein the first, second, third, fourth, fifth, sixth, and seventh promoter are operably linked to the same heterologous ancillary target gene.

68. The plurality of host cells according to claim 66 or 67, wherein the plurality further comprises an eighth host cell comprising an eighth promoter polynucleotide sequence selected from the group of promoters comprising the plurality of promoters with incrementally increasing levels of promoter activity, wherein the eighth promoter is functionally linked to a heterologous target gene, and wherein the first, second, third, fourth, fifth, sixth, seventh, and eighth promoter are different.

69. The plurality of host cells according to claim 68, wherein the first, second, third, fourth, fifth, sixth, seventh, and eighth promoter are operably linked to the same heterologous ancillary target gene.

70. The plurality of host cells according to any one of claims 34-70, wherein said host cells are Corynebacterium host cells.

71. The plurality of host cells according to claim 71, wherein said Corynebacterium host cells are Corynebacterium glutamicum host cells.

72. The plurality of host cells according to any one of claims 34-71, wherein said host cells further comprise a promoter polynucleotide sequence operably linked to a heterologous target gene directly involved in a selected metabolic pathway for production of the target molecule.

73. A method comprising culturing a plurality of host cells according to any one of claims 34-72.

74. A plurality of transformed host cells comprising a combination of promoter polynucleotides functionally linked to at least one heterologous ancillary target gene, wherein said combination of promoter polynucleotides comprises a plurality of promoters with incrementally increasing levels of promoter activity.

75. The transformed host cells according to claim 74, wherein said combination of promoter polynucleotides comprises at least one first promoter polynucleotide comprising a sequence selected from the group consisting of: SEQ ID NO:1, SEQ ID NO:5, and SEQ ID NO:7, and at least one second promoter polynucleotide comprising a sequence selected from the group consisting of: SEQ ID NO:2, SEQ ID NO:3, SEQ ID NO:4, SEQ ID NO:6, and SEQ ID NO:8.

76. The transformed host cells according to claim 74 or 75, wherein each promoter polynucleotide is functionally linked to a different heterologous target gene.

77. The transformed host cells according to claim 74 or 75, wherein each promoter polynucleotide is functionally linked to the same heterologous ancillary target gene.

78. A method comprising culturing a plurality of host cells according to any one of claims 74-77.

79. A method for increasing production of a target biomolecule, the method comprising:
a. providing a plurality of host cells, wherein the plurality of host cells comprises plurality of heterologous promoters with incrementally increasing levels of promoter activity, wherein the promoters of the plurality are each operably linked to a heterologous target gene and at least one promoter of the plurality of promoters is operably linked to a heterologous ancillary target gene;
b. culturing the plurality of host cells under conditions suitable to produce the target biomolecule; and
c. identifying a host cell from the plurality of host cells that exhibits increased production of target biomolecule as compared to a control cell.

80. The method of claim 79, wherein the method further comprises isolating the identified host cell from other host cells of the plurality.

81. The method of claim 80, wherein the method comprises storing the isolated host cell.

82. The method of claim 80, wherein the method comprises expanding the isolated host cell.

83. The method of any one of claims 79-82, wherein the plurality of host cells comprises at least a first and a second host cell, wherein the first and second host cell are transformed with a different promoter selected from the plurality of heterologous promoters with incrementally increasing levels of promoter activity and wherein the different promoters are operably linked to the same heterologous ancillary target gene.

84. The method of claim 83, wherein the plurality of host cells further comprises a third host cell, wherein the first, second, and third host cell are each transformed with a different promoter selected from the plurality of heterologous promoters with incrementally increasing levels of promoter activity and wherein the different promoters are operably linked to the same heterologous ancillary target gene.

85. The method of claim 84, wherein the plurality of host cells further comprises a fourth host cell, wherein the first, second, third, and fourth host cell are each transformed with a different promoter selected from the plurality of heterologous promoters with incrementally increasing levels of promoter activity and wherein the different promoters are operably linked to the same heterologous ancillary target gene.

86. The method of claim 85, wherein the plurality of host cells further comprises a fifth host cell, wherein the first, second, third, fourth, and fifth host cell are each transformed with a different promoter selected from the plurality of heterologous promoters with incrementally increasing levels of promoter activity and wherein the different promoters are operably linked to the same heterologous ancillary target gene.

87. The method of claim 86, wherein the plurality of host cells further comprises a sixth host cell, wherein the first, second, third, fourth, fifth, and sixth host cell are each transformed with a different promoter selected from the plurality of heterologous promoters with incrementally increasing levels of promoter activity and wherein the different promoters are operably linked to the same heterologous ancillary target gene.

88. The method of claim 87, wherein the plurality of host cells further comprises a seventh host cell, wherein the first, second, third, fourth, fifth, sixth, and seventh host cell are each transformed with a different promoter selected from the plurality of heterologous promoters with incrementally increasing levels of promoter activity and wherein the different promoters are operably linked to the same heterologous ancillary target gene.

89. The method of claim 88, wherein the plurality of host cells further comprises an eighth host cell, wherein the first, second, third, fourth, fifth, sixth, seventh, and eighth host cell are each transformed with a different promoter selected from the plurality of heterologous promoters with incrementally increasing levels of promoter activity and wherein the different promoters are operably linked to the same heterologous ancillary target gene.

90. The method of any one of claims 79-89, wherein the heterologous ancillary target gene is a shell 3 and/or shell 4 target gene.

91. The method of any one of claims 79-90, wherein the providing comprises transforming a plurality of host cells with a recombinant vector library comprising the plurality of promoters with incrementally increasing levels of promoter activity operably linked to the heterologous target genes.
